(19) United States
(12) Patent Application Publication
(10) Pub. No.: US 2022/0259632 A1
(43) Pub. Date: Aug. 18, 2022

(54) METHOD OF OLIGONUCLEOTIDE SYNTHESIS

(71) Applicant: Nuclera Nucleics Ltd, Cambridge, Cambridgeshire (GB)

(72) Inventors: Michael Chun Hao Chen, Cambridge (GB); Gordon Ross McInroy, Cambridge (GB)

(21) Appl. No.: 17/436,314

(22) PCT Filed: Mar. 9, 2020
(86) PCT No.: PCT/GB2020/050558

§ 371 Date: Sep. 3, 2021

(30) Foreign Application Priority Data
Mar. 7, 2019 (GB) 1903055.0

(51) Int. Cl. C12P 19/34; B01J 19/00; C12N 9/12; C07H 21/04

(52) U.S. Cl. CPC C12P 19/34; B01J 19/0046; C12N 9/1264; C12Y 207/07031; B01J 2219/00722; B01J 2219/00596; B01J 2219/00608; B01J 2219/00713; B01J 2219/00716; C07H 21/04

(57) ABSTRACT

The invention relates to methods and kits for the synthesis of oligonucleotides via controlled, localised deprotection of 3′-ONH₂ groups on a solid support.

### FIELD OF THE INVENTION

[0001] The invention relates to methods and kits for the synthesis of oligonucleotides via controlled, localised deprotection of 3′-ONH₂ groups on a solid support.

### BACKGROUND OF THE INVENTION

[0002] Nucleic acid synthesis is vital to modern biotechnology. The rapid pace of development in the biotechnology arena has been made possible by the scientific community's ability to artificially synthesise DNA, RNA and proteins.

[0003] Artificial DNA synthesis allows biotechnology and pharmaceutical companies to develop a range of peptide therapeutics, such as insulin for the treatment of diabetes. It allows researchers to characterise cellular proteins to develop new small molecule therapies for the treatment of diseases our aging population faces today, such as heart disease and cancer. It even paves the way forward to creating life, as the Venter Institute demonstrated in 2010 when they placed an artificially synthesised genome into a bacterial cell.

[0004] However, current DNA synthesis technology does not meet the demands of the biotechnology industry. Despite being a mature technology, it is practically impossible to synthesise a DNA strand greater than 200 nucleotides in length, and most DNA synthesis companies only offer up to 120 nucleotides. In comparison, an average protein-coding gene is of the order of 2000-3000 contiguous nucleotides, a chromosome is at least a million contiguous nucleotides in length and an average eukaryotic genome numbers in the billions of nucleotides. In order to prepare nucleic acid strands thousands of base pairs in length, all major gene synthesis companies today rely on variations of a ‘synthesise and stitch’ technique, where overlapping 40-60-mer fragments are synthesised and stitched together by enzymatic copying and extension. Current methods generally allow up to 3 kb in length for routine production.

[0005] The reason DNA cannot be chemically synthesised beyond 120-200 nucleotides at a time is due to the current methodology for generating DNA, which uses synthetic chemistry (i.e., phosphoramidite technology) to couple a nucleotide one at a time to make DNA. Even if the efficiency of each nucleotide-coupling step is 99% efficient, it is mathematically impossible to synthesise DNA longer than 200 nucleotides in acceptable yields. The Venter Institute illustrated this laborious process by spending 4 years and 20 million USD to synthesise the relatively small genome of a bacterium.

[0006] Known methods of DNA sequencing use template-dependent DNA polymerases to add 3′-reversibly terminated nucleotides to a growing double-stranded substrate. In the ‘sequencing-by-synthesis’ process, each added nucleotide contains a dye, allowing the user to identify the exact sequence of the template strand. Albeit on double-stranded DNA, this technology is able to produce strands of between 500-1000 bps long. However, this technology is not suitable for de novo nucleic acid synthesis because of the requirement for an existing nucleic acid strand to act as a template.

[0007] Various attempts have been made to use a terminal deoxynucleotidyl transferase for de novo single-stranded DNA synthesis. Uncontrolled de novo single stranded DNA synthesis, as opposed to controlled, takes advantage of TdT's deoxynucleoside triphosphate (dNTP) 3′ tailing properties on single-stranded DNA to create, for example, homopolymeric adaptor sequences for next-generation sequencing library preparation. In controlled extensions, a reversible deoxynucleoside triphosphate termination technology needs to be employed to prevent uncontrolled addition of dNTPs to the 3′-end of a growing DNA strand. The development of a controlled single-stranded DNA synthesis process through TdT would be invaluable to in situ DNA synthesis for gene assembly or hybridization microarrays as it removes the need for an anhydrous environment and allows the use of various polymers incompatible with organic solvents. However, TdT has not been shown to efficiently add nucleoside triphosphates containing 3′-O-reversibly terminating moieties for building up a nascent single-stranded DNA chain necessary for a de novo synthesis cycle, and thus the synthesis of long strands is inefficient.

[0008] Oligonucleotides can be synthesized either individually or on an array. In flow based array DNA synthesis systems, it is necessary to selectively deprotect a defined set of synthesis sites. This has previously been achieved through means such as light-mediated deprotection and masks, as well as electrochemical generation of acid and patterned electrodes. However the synthesis relies on organic solvents and requires a number of washing steps changes of reagent per monomer addition.

[0009] There is therefore a need for a new method to efficiently prepare large numbers of oligonucleotides in order to provide an improved method of nucleic acid synthesis that is able to overcome the problems associated with currently available methods.

### BRIEF DESCRIPTION OF THE FIGURES

[0010] FIG. 1. SEQ ID 728 after incubation with addition solution containing an engineered TdT and 3′-ONH₂ dNTP. The mass spectra deconvolutes to give an observed mass of 4838.76. The expected mass following addition is 4836.81.

[0011] FIG. 2. The effect of changing pH on the efficiency of nitrite-mediated 3′-aminoxy deprotection. As the pH is raised the extent of aminoxy to hydroxyl conversion within 5 minutes falls significantly.

### SUMMARY OF THE INVENTION

[0012] The invention relates to methods and kits for the synthesis of oligonucleotides via controlled, localised deprotection of 3′-ONH₂ groups on a solid support. The inventors have appreciated that the nitrite-mediated deprotection of the 3′-O-aminoxy reversible terminator shows pH dependence, which can therefore be used to locally deprotect the 3′-O-aminoxy reversible terminator from desired regions of a solid support.

[0013] Disclosed is a method for the synthesis of a plurality of immobilised nucleic acids of differing sequence, comprising:
[0014] a. taking a system with a solid support having a plurality of 5′-end immobilised nucleic acids which are 3′-ONH₂ protected and a nitrite deprotection solution that is inactive at the basal pH of the system;
[0015] b. lowering the pH at a site localized to one or more selected immobilised nucleic acids, thereby activating the deprotection solution to deprotect the 3′-ends of a subset of the immobilised nucleic acids;
[0016] c. extending the deprotected 3′-ends of the immobilized nucleic acids;
[0017] d. lowering the pH at a site localized to one or more selected immobilised nucleic acids, thereby activating the deprotection solution to deprotect the 3′-ends of a subset of the immobilised nucleic acids, wherein the localized sites are different to those of step b;
[0018] e. extending the deprotected 3′-ends of the immobilized nucleic acids, thereby synthesizing a plurality of immobilised nucleic acids of differing sequence.

[0019] Disclosed is a method for the synthesis of a plurality of immobilised nucleic acids of differing sequence, comprising:
[0020] a. taking a system with a solid support having a plurality of 5′-end immobilised nucleic acids which are 3′-ONH₂ protected and a nitrite deprotection solution that is inactive at the basal pH of the system;
[0021] b. lowering the pH at a site localized to one or more selected immobilised nucleic acids, thereby activating the deprotection solution to deprotect the 3′-ends of a subset of the immobilised nucleic acids;
[0022] c. extending the deprotected 3′-ends of the immobilized nucleic acids;
[0023] d. repeating steps b-c with desired subsets of immobilized nucleic acid, thereby synthesizing a plurality of immobilized nucleic acids of differing sequence.

[0024] The nitrite solution can optionally be present during the cycles of extension, providing the pH of the extension solution is above the level where deprotection occurs. This reduces the number of reagent exchanges. The system can comprise nucleotides with 3′-ONH₂ protection, an optionally modified terminal transferase enzyme (TdT), buffer components to retain a basal pH and a nitrite deprotection solution that is inactive at the basal pH.

[0025] Thus disclosed is a method for the synthesis of a plurality of immobilised nucleic acids of differing sequence, comprising:
[0026] a. taking a system with a solid support having a plurality of 5′-end immobilised nucleic acids which are 3′-ONH₂ protected and a nitrite deprotection solution that is inactive at the basal pH of the system;
[0027] b. lowering the pH at a site localized to one or more selected immobilised nucleic acids, thereby activating the deprotection solution to deprotect the 3′-ends of a subset of the immobilised nucleic acids;
[0028] c. extending the deprotected 3′-ends of the immobilized nucleic acids using nucleotides with 3′-ONH₂ protection and an optionally modified terminal transferase enzyme (TdT);
[0029] d. lowering the pH at a site localized to one or more selected immobilised nucleic acids, thereby activating the deprotection solution to deprotect the 3′-ends of a subset of the immobilised nucleic acids, wherein the localized sites are different to those of step b;
[0030] e. extending the deprotected 3′-ends of the immobilized nucleic acids using nucleotides with 3′-ONH₂ protection and an optionally modified terminal transferase enzyme (TdT), thereby synthesizing a plurality of immobilised nucleic acids of differing sequence.

[0031] Alternatively the extension and deprotection solutions can be separate. If the solutions are separate, disclosed is a method comprising the steps of
[0032] a. taking a system with a solid support having a plurality of 5′-end immobilised nucleic acids which are 3′-ONH₂ protected;
[0033] b. adding a nitrite deprotection solution that is inactive at the basal pH of the system;
[0034] c. lowering the pH at a site localized to one or more selected immobilised nucleic acids, thereby activating the deprotection solution to deprotect the 3′-ends of a subset of the immobilised nucleic acids;
[0035] d. removing the nitrite deprotection solution;
[0036] e. extending the deprotected 3′-ends of the immobilized nucleic acids;
[0037] f. adding a nitrite deprotection solution that is inactive at the basal pH of the system;
[0038] g. lowering the pH at a site localized to one or more selected immobilised nucleic acids, thereby activating the deprotection solution to deprotect the 3′-ends of a subset of the immobilised nucleic acids, wherein the localized sites are different to those of step c;
[0039] h. extending the deprotected 3′-ends of the immobilized nucleic acids, thereby synthesizing a plurality of immobilised nucleic acids of differing sequence.

[0040] Again the extension can be performed using nucleotides with 3′-ONH₂ protection and an optionally modified terminal transferase enzyme (TdT). The method can comprise the steps of
[0041] a. taking a system with a solid support having a plurality of 5′-end immobilised nucleic acids which are 3′-ONH₂ protected;
[0042] b. adding a nitrite deprotection solution that is inactive at the basal pH of the system;
[0043] c. lowering the pH at a site localized to one or more selected immobilised nucleic acids, thereby activating the deprotection solution to deprotect the 3′-ends of a subset of the immobilised nucleic acids;
[0044] d. removing the nitrite deprotection solution;
[0045] e. extending the deprotected 3′-ends of the immobilized nucleic acids using nucleotides with 3′-ONH₂ protection and an optionally modified terminal transferase enzyme (TdT);
[0046] f. adding a nitrite deprotection solution that is inactive at the basal pH of the system;
[0047] g. lowering the pH at a site localized to one or more selected immobilised nucleic acids, thereby activating the deprotection solution to deprotect the 3′-ends of a subset of the immobilised nucleic acids, wherein the localized sites are different to those of step c;
[0048] h. extending the deprotected 3′-ends of the immobilized nucleic acids using nucleotides with 3′-ONH₂ protection and an optionally modified terminal transferase enzyme (TdT), thereby synthesizing a plurality of immobilised nucleic acids of differing sequence.

[0049] Disclosed is a method for the synthesis of a plurality of immobilised nucleic acids of differing sequence, comprising:
[0050] a. taking a system with a solid support having a plurality of 5′-end immobilised nucleic acids which are 3′-ONH₂ protected;
[0051] b. adding a nitrite deprotection solution that is inactive at the basal pH of the system;
[0052] c. lowering the pH at a site or sites localized to one or more selected immobilised nucleic acids, thereby activating the deprotection solution to deprotect the 3′-ends of a subset of the immobilised nucleic acids;
[0053] d. removing the nitrite deprotection solution;
[0054] e. extending the deprotected 3′-ends of the immobilized nucleic acids;
[0055] f. repeating steps b-e with desired subsets of immobilized nucleic acid, thereby synthesizing a plurality of immobilized nucleic acids of differing sequence.

[0056] Generally each extension cycle contains a single species of nucleotide. The nucleotide varies cycle by cycle in order to build up the desired sequences at the different locations. Thus a different nucleotide solution is added compared to the previous cycle of extension, and the solutions are repeated in cycles to grow differing sequences in differing areas of the solid support.

[0057] The immobilised nucleic acids can be single stranded DNA species or double stranded DNA species, with a 3′ overhang, or a mixture thereof.

[0058] The pH can be controlled by a variety of means, including an electrochemically generated acid (EGA) or photogenerated acid. The EGA can be selected from the electrolysis of water or the modulation of a hydroquinone/benzoquinone system. It will be apparent to the person skilled in the art that any means of selectively changing the pH in a localized area can be used in the disclosed method.

[0059] When the solution contains nucleotides with 3′-ONH₂ protection, an optionally modified terminal transferase enzyme (TdT), buffer components to retain a basal pH and a nitrite deprotection solution that is inactive at the basal pH, the modified TdT is active at the basal pH of the system and generally inactive at the altered pH required for deprotection of the 3′-ends of the immobilised nucleic acids, thereby preventing extension of the released OH groups prior to addition of the next nucleotide.

[0060] If a homopolymer sequence is desired, it may be possible to prepare the sequence simply by altering the pH of a solution containing nucleotides with 3′-ONH₂ protection, an optionally modified terminal transferase enzyme (TdT), buffer components to retain a basal pH and a nitrite deprotection solution that is inactive at the basal pH. In such cases the modified TdT is active at the basal pH of the system and inactive at the altered pH required for deprotection of the 3′-ends of the immobilised nucleic acids. Thus deprotection only occurs when the pH is lowered, and extension of the freed OH groups occurs when the pH is buffered back to the basal level.

[0061] In order for efficient deprotection, the altered pH required for deprotection of the 3′-ends of the immobilised nucleic acids is pH 5.5 or lower.

[0062] In order to ensure no deprotection occurs, the basal pH of the system is 7.5 or higher. Generally the nitrite solution is buffered. The buffer can be selected from MES, citrate, phosphate, acetate or a combination thereof. The buffer concentration can be 0.1-5000 mM, preferably between 500 mM and 2500 mM.

[0063] The concentration of nitrite can be 500 mM or higher. The concentration of nitrite can be 700 mM or higher. The concentration of nitrite can be 500 -1000mM. The nitrite can be sodium nitrite.

[0064] In order to improve generation of localized acid, the system can comprise alternating anodic and cathodic electrodes.

[0065] The nucleotides grown can be of any desired length. Each of the plurality of immobilized nucleic acids can be extended by at least 25 bases.

[0066] After production, the oligonucleotide sequences can be released from being immobilized, for example by cleavage of the group attaching the oligonucleotide to the support.

[0067] Disclosed is a method for the selective deprotection of immobilised nucleic acids, comprising:
[0068] a. taking a system comprising:
   [0069] i. a solid support wherein the solid support has a plurality of immobilised nucleic acids which are 3′-ONH₂ protected;
   [0070] ii. a nitrite deprotection solution that is inactive at the basal pH of the system; and
[0071] b. temporarily lowering the pH at a site localized to one or more selected immobilised nucleic acids, thereby activating the deprotection solution to deprotect the 3′-ends of a subset of the immobilised nucleic acids.

[0072] Disclosed is a kit for preparing a plurality of immobilised nucleic acids of differing sequence, comprising:
[0073] a. a solid support having a plurality of 5′-end immobilised nucleic acids which are 3′-ONH₂ protected;
[0074] b. a buffered nitrite deprotection solution that is inactive at the basal pH of the system;
[0075] c. nucleotides with 3′-ONH₂ protection; and
[0076] d. an optionally modified terminal transferase enzyme (TdT).

### DETAILED DESCRIPTION OF THE INVENTION

[0077] In flow based array DNA synthesis systems, it is necessary to selectively deprotect a defined set of synthesis sites. This has previously been achieved through means such as light-mediated deprotection and masks, as well as electrochemical generation of acid and patterned electrodes.

[0078] While previous systems have used electrochemically generated acid (EGA) to remove the DMT protecting group in phosphoramidite oligonucleotide synthesis, it is the EGA-mediated pH change that directly causes acid-mediated removal of the DMT group. In this embodiment, the EGA-mediated pH change modulates the kinetics of a secondary reaction—in this case the nitrite-mediated conversion of the aminoxy moiety (—ONH2) to the hydroxyl moiety (—OH).

[0079] Selective deprotection can be achieved in a system where all sites are exposed to nitrite solution at pH 6-9, preferably above pH 7.5 (or another pH where nitrite-mediated deprotection of aminoxy nucleotides does not occur), and a defined set of sites have their pH changed through (EGA). This EGA-mediated pH change would be to a pH suitable for nitrite-mediated deprotection of the aminoxy group—such as pH 5.50 for example. EGA can be achieved through electrolysis of water, or the through modulation of electroactive agents such as the hydroquinone/benzoquinone redox pair.

[0080] Ideally EGA only affects the defined sites where EGA occurs; diffusion of EGA could lead to synthesis errors due to the deprotection of 3′-O reversible terminators on non-specified sites. The presence of a buffered nitrite solution would help reduce the diffusion of EGA away from the electrode, as while the EGA would exceed the buffering capacity near the electrode, it would not exceed the buffering capacity at a distance from the electrode. The buffering demands (ie: concentration of buffer) will be related to the concentration of electroactive agents if they are used in an EGA system. Another mechanism to reduce errors caused by diffusion of EGA from the electrode involves alternating anodic and cathodic electrodes, as acid is generated at one and consumed at the other. The electrodes can be patterned such that synthesis sites of one polarity are isolated from other synthesis sites by electrodes of the other polarity.

[0081] It is possible to envisage a system where all reaction components are present in the same mixture.

[0082] For example a solution could contain:

[0083] Engineered TdT

[0084] Reversibly terminated nucleotide

[0085] Pyrophosphatase (optional)

[0086] Buffer (at pH 7.5 for example)

[0087] Secondary buffering system (optional)

[0088] Sodium nitrite

[0089] Quinine/hydroquinone (optional)

[0090] In the absence of EGA, this solution acts as an addition solution. The nitrite is inactive at the chosen pH (e.g. 7.5) while the engineered TdT is active and performs addition of reversibly terminated nucleotides to single stranded DNA.

[0091] In the presence of EGA, this solution acts as a deblocking solution. The nitrite is active at acidic pH (e.g. pH 5.5 and below) while the engineered TdT is inactive and unable to perform nucleotide incorporation.

[0092] Such a system would reduce the number of wash steps necessary in a synthesis process. Such a system would have utility in the rapid switching between addition and deblocking modes. For example, where the enzyme recovers functionality following a pH 7.5->pH 5.5->pH 7.5 cycle.

[0093] A dual buffer system may be used to control the pH change upon production of EGA. With a single buffer system, once the buffering capacity is overcome it is possible the pH may rapidly drop to highly acidic pH such as pH 1-3. With a dual buffer system, a low concentration primary buffer with a pKa near the addition pH would resist change induced by EGA, but quickly be overcome. A secondary buffer at a higher concentration with a pKa near the desired pH for deblocking (e.g. 5-5.5) would then strongly resist further decreases in pH and prevent highly acidic pH being reached. As DNA suffers increasing damage with decreasing pH, a dual buffer system offers an advantage. An alternative to a dual buffer system would be to control the change in pH through limiting the time EGA is generated.

[0094] The inventors have previously developed a selection of engineered terminal transferase enzymes, any of which may be used in the current process.

[0095] Terminal transferase enzymes are ubiquitous in nature and are present in many species. Many known TdT sequences have been reported in the NCBI database http://www.ncbi.nlm.nih.gov/. The sequences of the various described terminal transferases show some regions of highly conserved sequence, and some regions which are highly diverse between different species.

[0096] The inventors have modified the terminal transferase from Lepisosteus oculatus TdT (spotted gar) (shown below). However the corresponding modifications can be introduced into the analagous terminal transferase sequences from any other species, including the sequences listed above in the various NCBI entries. The amino acid sequence of the spotted gar (Lepisosteus oculatus) is shown below (SEQ ID no 1):

MLHIPIFPPIKKRQKLPESRNSCKYEVKFSEVAIFLVERKMGSSRRKFLTN
LARSKGFRIEDVLSDAVTHVVAEDNSADELWQWLQNSSLGDLSKIEVLDIS
WFTECMGAGKPVQVEARHCLVKSCPVIDQYLEPSTVETVSQYACQRRTTME
NHNQIFTDAFAILAENAEFNESEGPCLAFMRAASLLKSLPHAISSSKDLEG
LPCLGDQTKAVIEDILEYGQCSKVQDVLCDDRYQTIKLFTSVFGVGLKTAE
KWYRKGFHSLEEVQADNAIHFTKMQKAGFLYYDDISAAVCKAEAQAIGQIV
EETVRLIAPDAIVTLIGGFRRGKECGHDVDFLITTPEMGKEVWLLNRLINR
LQNQGILLYYDIVESTFDKTRLPCRKFEAMDHFQKCFAIIKLKKELAAGRV
QKDWKAIRVDFVAPPVDNFAFALLGWTGSRQFERDLRRFARHERKMLLDNH
ALYDKTKKIFLPAKTEEDIFAHLGLDYIDPWQRNA

[0097] The inventors have identified various regions in the amino acid sequence having improved properties. Certain regions improve the solubility and handling of the enzyme. Certain other regions improve the ability to incorporate nucleotides with modifications at the 3′-position.

[0098] Modifications which improve the solubility include a modification within the amino acid region WLLNRLINRLQNQGILLYYDIV shown highlighted in the sequence below.

MLHIPIFPPIKKRQKLPESRNSCKYEVKFSEVAIFLVERKMGSSRRKFLTNLARSKGFRIEDVLSDAV
THVVAEDNSADELWQWLQNSSLGDLSKIEVLDISWFTECMGAGKPVQVEARHCLVKSCPVIDQYLEPS
TVETVSQYACQRRTTMENHNQIFTDAFAILAENAEFNESEGPCLAFMRAASLLKSLPHAISSSKDLEG
LPCLGDQTKAVIEDILEYGQCSKVQDVLCDDRYQTIKLFTSVFGVGLKTAEKWYRKGFHSLEEVQADN
AIHFTKMQKAGFLYYDDISAAVCKAEAQAIGQIVEETVRLIAPDAIVTLTGGFRRGKECGHDVDFLIT

[chemical structure]

QKDWKAIRVDFVAPPVDNFAFALLGWTGSRQFERDLRRFARHERKMLLDNHALYDKTKKIFLPAKTEE
DIFAHLGLDYIDPWQRNA

[0099] Modifications which improve the incorporation of modified nucleotides can be at one or more of selected regions shown below. The second modification can be selected from one or more of the amino acid regions VAIF, EDN, MGA, ENHNQ, FMRA, HAI, TKA, FHS, QADNA, MQK, SAAVCK, EAQA, TVR, KEC, TPEMGK, DHFQ, LAAG, APPVDN, FARHERKMLLDNHA, and YIDP shown highlighted in the sequence below.

[chemical structure]

[chemical structure]

[chemical structure]

[chemical structure]

[chemical structure]

[chemical structure]

[chemical structure]

[chemical structure]

[0100] Described herein is a modified terminal deoxynucleotidyl transferase (TdT) enzyme comprising at least one amino acid modification when compared to a wild type sequence SEQ ID NO 1 or the homologous amino acid sequence of a terminal deoxynucleotidyl transferase (TdT) enzyme in other species, wherein the modification is selected from one or more of the amino acid regions WLLNRLINRLQNQGILLYYDI, VAIF, EDN, MGA, ENHNQ, FMRA, HAI, TKA, FHS, QADNA, MQK, SAAVCK, EAQA, TVR, KEC, TPEMGK, DHFQ, LAAG, APPVDN, FARHERKMLLDNHA, and YIDP of the sequence of SEQ ID NO 1 or the homologous regions in other species.

[0101] The terminal transferase or modified terminal transferase can be any enzyme capable of template independent strand extension. The enzyme may be a modified terminal deoxynucleotidyl transferase (TdT) enzyme comprising amino acid modifications when compared to a wild type sequence Lepisosteus oculatus TdT (spotted gar) sequence or a truncated version thereof or the homologous amino acid sequence of a terminal deoxynucleotidyl transferase (TdT) enzyme in other species or the homologous amino acid sequence of Polμ, Polβ, Polλ, and Polθ of any species or the homologous amino acid sequence of X family polymerases of any species, wherein the amino acid is modified at one or more of the amino acids:

[0102] V32, A33, I34, F35, A53, V68, V71, E97, I101, M108, G109, A110, Q115, V116, S125, T137, Q143, M152, E153, N154, H155, N156, Q157, I158, I165, N169, N173, S175, E176, G177, P178, C179, L180, A181, F182, M183, R184, A185, L188, H194, A195, I196, S197, S198, S199, K200, E203, G204, D210, Q211, T212, K213, A214, I216, E217, D218, L220, Y222, V228, D230, Q238, T239, L242, L251, K260, G261, F262, H263, S264, L265, E267, Q269, A270, D271, N272, A273, H275, F276, T277, K278, M279, Q280, K281, S291, A292, A293, V294, C295, K296, E298, A299, Q300, A301, Q304, I305, T309, V310, R311, L312, I313, A314, I318, V319, T320, G328, K329, E330, C331, L338, T341, P342, E343, M344, G345, K346, W349, L350, L351, N352, R353, L354, I355, N356, R357, L358, Q359, N360, Q361, G362, I363, L364, L365, Y366, Y367, D368, I369, V370, K376, T377, C381, K383, D388, H389, F390, Q391, K392, F394, I397, K398, K400, K401, E402, L403, A404, A405, G406, R407, D411, A421, P422, P423, V424, D425, N426, F427, A430, R438, F447, A448, R449, H450, E451, R452, K453, M454, L455, L456, D457, N458, H459, A460, L461, Y462, D463, K464, T465, K466, K467, T474, D477, D485, Y486, I487, D488, P489.

[0103] The enzyme may be a modified terminal deoxynucleotidyl transferase (TdT) enzyme comprising at least one amino acid modification when compared to a wild type sequence or a truncated version thereof, wherein the modification is selected from one or more of the amino acid regions WLLNRLINRLQNQGILLYYDIV, VAIF, MGA, MENHNQI, SEGPCLAFMRA, HAISSS, DQTKA, KGFHS, QADNA, HFTKMQK, SAAVCK, EAQA, TVRLI, GKEC, TPEMGK, DHFQK, LAAG, APPVDNF, FARHERKMLLDNHALYDKTKK, and DYIDP of the sequence of Lepisosteus oculatus TdT (spotted gar) or the homologous regions in other species or the homologous regions of Polμ, Polβ, Polλ, and Polθ of any species or the homologous regions of X family polymerases of any species.

[0104] Homologous refers to protein sequences between two or more proteins that possess a common evolutionary origin, including proteins from superfamilies in the same species of organism as well as homologous proteins from different species. Such proteins (and their encoding nucleic acids) have sequence homology, as reflected by their sequence similarity, whether in terms of percent identity or by the presence of specific residues or motifs and conserved positions. A variety of protein (and their encoding nucleic acid) sequence alignment tools may be used to determine sequence homology. For example, the Clustal Omega multiple sequence alignment program provided by the European Molecular Biology Laboratory (EMBL) can be used to determine sequence homology or homologous regions. To aid alignment comparison sequences of the enzymes from Bos Taurus (cow) and Mus musculus (mouse) are shown in SEQ ID NOs 2 and 3.

[0105] Improved sequences as described herein can contain both modifications, namely

[0106] a. a first modification is within the amino acid region WLLNRLINRLQNQGILLYYDI of the sequence of SEQ ID NO 1 or the homologous region in other species; and

[0107] b. a second modification is selected from one or more of the amino acid regions VAIF, EDN, MGA, ENHNQ, FMRA, HAI, TKA, FHS, QADNA, MQK, SAAVCK, EAQA, TVR, KEC, TPEMGK, DHFQ, LAAG, APPVDN, FARHERKMLLDNHA, and YIDP of the sequence of SEQ ID NO 1 or the homologous regions in other species.

[0108] Disclosed is a modified terminal deoxynucleotidyl transferase (TdT) enzyme comprising at least one amino acid modification when compared to a wild type sequence SEQ ID NO 1 or the homologous amino acid sequence of a terminal deoxynucleotidyl transferase (TdT) enzyme in other species, wherein the modification is selected from one or more of the amino acid regions WLLNRLINRLQNQGILLYYDI, VAIF, EDN, MGA, ENHNQ, FMRA, HAI, TKA, FHS, QADNA, MQK, SAAVCK, EAQA, TVR, KEC, TPEMGK, DHFQ, LAAG, APPVDN, FARHERKMLLDNHA, and YIDP of the sequence of SEQ ID NO 1 or the homologous regions in other species.

[0109] Further disclosed is a modified terminal deoxynucleotidyl transferase (TdT) enzyme comprising at least two amino acid modifications when compared to a wild type sequence SEQ ID NO 1 or the homologous amino acid sequence of a terminal deoxynucleotidyl transferase (TdT) enzyme in other species, wherein;

[0110] a. a first modification is within the amino acid region WLLNRLINRLQNQGILLYYDIV of the sequence of SEQ ID NO 1 or the homologous region in other species; and

[0111] b. a second modification is selected from one or more of the amino acid regions VAIF, EDN, MGA, ENHNQ, FMRA, HAI, TKA, FHS, QADNA, MQK, SAAVCK, EAQA, TVR, KEC, TPEMGK, DHFQ, LAAG, APPVDN, FARHERKMLLDNHA, and YIDP of the sequence of SEQ ID NO 1 or the homologous regions in other species.

[0112] For the purposes of brevity, the modifications are further described in relation to SEQ ID NO 1, but the modifications are applicable to the sequences from other species, for example those sequences listed above having sequences in the NCBI database.

[0113] The modification within the region WLLNRLINRLQNQGILLYYDIV or the corresponding region from other species help improve the solubility of the enzyme. The modification within the amino acid region WLLNRLINRLQNQGILLYYDIV can be at one or more of the underlined amino acids.

[0114] Particular changes can be selected from W-Q, N-P, R-K, L-V, R-L, L-W, Q-E, N-K, Q-K or I-L.

[0115] The sequence WLLNRLINRLQNQGILLYYDIV can be altered to QLLPKVINLWEKKGLLLYYDLV.

[0116] The second modification improves incorporation of nucleotides having a modification at the 3′ position in comparison to the wild type sequence. The second modification can be selected from one or more of the amino acid regions VAIF, EDN, MGA, ENHNQ, FMRA, HAI, TKA, FHS, QADNA, MQK, SAAVCK, EAQA, TVR, KEC, TPEMGK, DHFQ, LAAG, APPVDN, FARHERKMLLDNHA, and YIDP of the sequence of SEQ ID NO 1 or the homologous regions in other species. The second modification can be selected from two or more of the amino acid regions VAIF, EDN, MGA, ENHNQ, FMRA, HAI, TKA, FHS, QADNA, MQK, SAAVCK, EAQA, TVR, KEC, TPEMGK, DHFQ, LAAG, APPVDN, FARHERKMLLDNHA, and YIDP of the sequence of SEQ ID NO 1 or the homologous regions in other species shown highlighted in the sequence below.

[chemical structure]

[chemical structure]

[chemical structure]

[chemical structure]

[chemical structure]

[chemical structure]

[chemical structure]

[chemical structure]

[0117] The identified positions commence at positions V32, E74, M108, F182, T212, D271, M279, E298, A421, L456, Y486. Modifications disclosed herein contain at least one modification at the defined positions.

[0118] The modified amino acid can be in the region FM RA. The modified amino acid can be in the region QADNA. The modified amino acid can be in the region EAQA. The modified amino acid can be in the region APP. The modified amino acid can be in the region LDNHA. The modified amino acid can be in the region YIDP. The region FARHERKMLLDNHA is advantageous for removing substrate biases in modifications. The FARHERKMLLDNHA region appears highly conserved across species.

[0119] The modification selected from one or more of the amino acid regions FMRA, QADNA, EAQA, APP, FARHERKMLLDNHA, and YIDP can be at the underlined amino acid(s).

[0120] The positions for modification can include A53, V68, V71, D75, E97, I101, G109, Q115, V116, S125, T137, Q143, N154, H155, Q157, I158, I165, G177, L180, A181, M183, A195, K200, T212, K213, A214, E217, T239, F262, S264, Q269, N272, A273, K281, S291, K296, Q300, T309, R311, E330, T341, E343, G345, N352, N360, Q361, I363, Y367, H389, L403, G406, D411, A421, P422, V424, N426, R438, F447, R452, L455, and/or D488.

[0121] Amino acid changes include any one of A53G, V68I, V71I, D75N, D75Q, E97A, I101V, G109E, G109R, Q115E, V116I, V116S, S125R, T137A, Q143P, N154H, H155C, Q157K, Q157R, 1158M, 1165V, G177D, L180V, A181E, M183R, A195P, K200R, T212S, K213S, A214R, E217Q, T239S, F262L, S264T, Q269K, N272K, A273S, A273T, K281R, S291N, K296R, Q300D, T309A, R311W, E330N, T341S, E343Q, G345R, N352Q, N360K, Q361K, I363L, Y367C, H389A, L403R, G406R, D411N, A421L, A421M, A421V, P422A, P422C, V424Y, N426R, R438K, F447W, R452K, L455I, and/or D488P.

[0122] Amino acid changes include any two or more of A53G, V68I, V71I, D75N, D75Q, E97A, I101V, G109E, G109R, Q115E, V116I, V116S, S125R, T137A, Q143P, N154H, H155C, Q157K, Q157R, 1158M, 1165V, G177D, L180V, A181E, M183R, A195P, K200R, T212S, K213S, A214R, E217Q, T239S, F262L, S264T, Q269K, N272K, A273S, A273T, K281R, S291N, K296R, Q300D, T309A, R311W, E330N, T341S, E343Q, G345R, N352Q, N360K, Q361K, I363L, Y367C, H389A, L403R, G406R, D411N, A421L, A421M, A421V, P422A, P422C, V424Y, N426R, R438K, F447W, R452K, L455I, and/or D488P.

[0123] The modification of QADNA to KADKA, QADKA, KADNA, QADNS, KADNT, or QADNT is advantageous for the incorporation of 3′-O-modified nucleoside triphosphates to the 3′-end of nucleic acids and removing substrate biases during the incorporation of modified nucleoside triphosphates. The modification of APPVDN to MCPVDN, MPPVDN, ACPVDR, VPPVDN, LPPVDR, ACPYDN, LCPVDN, or MAPVDN is advantageous for the incorporation of 3′-O-modified nucleoside triphosphates to the 3′-end of nucleic acids and removing substrate biases during the incorporation of modified nucleoside triphosphates. The modification of FARHERKMLLDRHA to WARHERKMILDNHA, FARHERKMILDNHA, WARHERKMLLDNHA, FARHERKMLLDRHA, or FARHEKKMLLDNHA is also advantageous for the incorporation of 3′-O-modified nucleoside triphosphates to the 3′-end of nucleic acids and removing substrate biases during the incorporation of modified nucleoside triphosphates.

[0124] The modification can be selected from one or more of the following sequences FRRA, QADKA, EADA, MPP, FARHERKMLLDRHA, and YIPP. Included is a modified terminal deoxynucleotidyl transferase (TdT) enzyme wherein the second modification is selected from two or more of the following sequences FRRA, QADKA, EADA, MPP, FARHERKMLLDRHA, and YIPP. Included is a modified terminal deoxynucleotidyl transferase (TdT) enzyme wherein the second modification contains each of the following sequences FRRA, QADKA, EADA, MPP, FARHERKMLLDRHA, and YIPP.

[0125] In order to aid purification of the expressed sequence, the amino acid can be further modified. For example the amino acid sequence can contain one or more further histidine residues at the terminus. Included is a modified terminal deoxynucleotidyl transferase (TdT) enzyme comprising any one of SEQ ID NOs 4 to 173 or a truncated version thereof. Sequences 4-173 are the full length sequences derived from the spotted gar. Included is a modified terminal deoxynucleotidyl transferase (TdT) enzyme comprising any one of SEQ ID NOs 174 to 343. Sequences 174 to 343 are N-truncated sequences as spotted gar/bovine chimeras. Sequences 344 to 727 are spotted Gar sequences in truncated form. Additionally, for these sequences, there is an N-terminal sequence that is incorporated simply as a protease cleavage site (MENLYFQG . . . ).

[0126] References herein to ‘nucleoside triphosphates’ refer to a molecule containing a nucleoside (i.e. a base attached to a deoxyribose or ribose sugar molecule) bound to three phosphate groups. Examples of nucleoside triphosphates that contain deoxyribose are: deoxyadenosine triphosphate (dATP), deoxyguanosine triphosphate (dGTP), deoxycytidine triphosphate (dCTP) or deoxythymidine triphosphate (dTTP). Examples of nucleoside triphosphates that contain ribose are: adenosine triphosphate (ATP), guanosine triphosphate (GTP), cytidine triphosphate (CTP) or uridine triphosphate (UTP). Other types of nucleosides may be bound to three phosphates to form nucleoside triphosphates, such as naturally occurring modified nucleosides and artificial nucleosides.

[0127] Therefore, references herein to ‘3′-blocked nucleoside triphosphates’ refer to nucleoside triphosphates (e.g., dATP, dGTP, dCTP or dTTP) which have an additional group on the 3′ end which prevents further addition of nucleotides, i.e., by replacing the 3′-OH group with a protecting group with a group 3′-ONH₂.

[0128] In one embodiment, the nitrite cleaving agent is added in the presence of a cleavage solution comprising a denaturant, such as urea, guanidinium chloride, formamide or betaine. The addition of a denaturant has the advantage of being able to disrupt any undesirable secondary structures in the DNA. In a further embodiment, the cleavage solution comprises one or more buffers. It will be understood by the person skilled in the art that the choice of buffer is dependent on the exact cleavage chemistry and cleaving agent required.

[0129] References herein to an ‘initiator sequence’ refer to a short oligonucleotide with a free 3′-end which the 3′-blocked nucleoside triphosphate can be attached to. In one embodiment, the initiator sequence is a DNA initiator sequence. In an alternative embodiment, the initiator sequence is an RNA initiator sequence.

[0130] References herein to a ‘DNA initiator sequence’ refer to a small sequence of DNA which the 3′-blocked nucleoside triphosphate can be attached to, i.e., DNA will be synthesised from the end of the DNA initiator sequence.

[0131] In one embodiment, the initiator sequence is between 5 and 50 nucleotides long, such as between 5 and 30 nucleotides long (i.e. between 10 and 30), in particular between 5 and 20 nucleotides long (i.e., approximately 20 nucleotides long), more particularly 5 to 15 nucleotides long, for example 10 to 15 nucleotides long, especially 12 nucleotides long.

[0132] In one embodiment, the initiator sequence is single-stranded. In an alternative embodiment, the initiator sequence is double-stranded. It will be understood by persons skilled in the art that a 3′-overhang (I.e., a free 3′-end) allows for efficient addition.

[0133] In one embodiment, the initiator sequence is immobilised on a solid support. This allows TdT and the cleaving agent to be removed without washing away the synthesised nucleic acid. The initiator sequence may be attached to a solid support stable under aqueous conditions so that the method can be easily performed via a flow setup.

[0134] In one embodiment, the initiator sequence is immobilised on a solid support via a reversible interacting moiety, such as a chemically-cleavable linker, an antibody/immunogenic epitope, a biotin/biotin binding protein (such as avidin or streptavidin), or glutathione-GST tag. Therefore, in a further embodiment, the method additionally comprises extracting the resultant nucleic acid by removing the reversible interacting moiety in the initiator sequence, such as by incubating with proteinase K.

[0135] In one embodiment, the initiator sequence contains a base or base sequence recognisable by an enzyme. A base recognised by an enzyme, such as a glycosylase, may be removed to generate an abasic site which may be cleaved by chemical or enzymatic means. A base sequence may be recognised and cleaved by a restriction enzyme.

[0136] In a further embodiment, the initiator sequence is immobilised on a solid support via a chemically-cleavable linker, such as a disulfide, allyl, or azide-masked hemiaminal ether linker. Therefore, in one embodiment, the method additionally comprises extracting the resultant nucleic acid by cleaving the chemical linker through the addition of tris(2-carboxyethyl)phosphine (TCEP) or dithiothreitol (DTT) for a disulfide linker; palladium complexes or an allyl linker; or TCEP for an azide-masked hemiaminal ether linker.

[0137] In one embodiment, the resultant nucleic acid is extracted and amplified by polymerase chain reaction using the nucleic acid bound to the solid support as a template. The initiator sequence could therefore contain an appropriate forward primer sequence and an appropriate reverse primer could be synthesised.

[0138] In one embodiment, the terminal deoxynucleotidyl transferase (TdT) of the invention is added in the presence of an extension solution comprising one or more buffers (e.g., Tris or cacodylate), one or more salts (e.g., Na⁺, K⁺, Mg²⁺, Mn²⁺, Cu²⁺, Zn²⁺, Co²⁺, etc. all with appropriate counterions, such as Cl) and inorganic pyrophosphatase (e.g., the Saccharomyces cerevisiae homolog). It will be understood that the choice of buffers and salts depends on the optimal enzyme activity and stability. The use of an inorganic pyrophosphatase helps to reduce the build-up of pyrophosphate due to nucleoside triphosphate hydrolysis by TdT. Therefore, the use of an inorganic pyrophosphatase has the advantage of reducing the rate of (1) backwards reaction and (2) TdT strand dismutation.

[0139] Also disclosed is a kit comprising a terminal deoxynucleotidyl transferase (TdT) as defined herein in combination with:

[0140] a. a solid support having a plurality of 5′-end immobilised nucleic acids which are 3′-ONH₂ protected;

[0141] b. a buffered nitrite deprotection solution that is inactive at the basal pH of the system; and

[0142] c. nucleotides with 3′-ONH₂ protection, and the modified terminal transferase enzyme (TdT)

### Exemplary Process

[0143] 1. Have an array of immobilised single stranded DNA species, or double stranded DNA species with a 3′ overhang, where the 3′ base has a 3′-ONH₂ moiety. For example, this array may be patterned on to a surface or may be through deposition of beads.

[0144] 2. Expose all immobilised DNA sites to inactive nitrite deprotection solution (the 3′-ONH₂ moiety remains intact at all locations).

[0145] 3. Selectively change the pH at a subset of immobilised DNA sites. The pH may be changed by generating acid through electrochemical or photochemical means. Where the pH is changed, active nitrite deprotection solution is produced. Active nitrite solution converts the 3′-ONH₂ moiety to a 3′-hydroxyl moiety.

[0146] 4. Cease generation of acid.

[0147] 5. Expose all immobilised DNA sites to addition solution containing (reversibly terminated) nucleotides, a terminal transferase enzyme, buffer components and optionally a pyrophosphatase. Only those sites exposed to active nitrite deprotection solution will contain the 3′-hydroxyl moiety that is permissive for enzyme-mediated incorporation of a nucleotide (which may be reversibly terminated).

[0148] 6. Repeat steps 1-5 (with optional wash steps in between) to generate an array of oligonucleotides with pre-defined and independent sequences.

[0149] The sequences grow at different lengths in different places on the support, depending on the presence or absence of the blocking ONH₂.

### Exemplary Data

[0150] SEQ ID 728: TTTTTTGACTTTTTT

[0151] Exact Molecular Weight: 4517.75

[0152] Seq 728 was incubated at 37° C. for 20 minutes with addition solution containing engineered TdT and 3′-ONH₂ dNTP. The reaction was stopped by heating to 80° C. for 5 minutes and the oligonucleotide purified by gel filtration. The oligonucleotide was then incubated with nitrite solution at various pH values for 5 minutes before being quenched and purified by gel filtration. Oligonucleotides were analysed by LCMS (Buffer A: 100 mM HFIP, 10 mM TEA in water; Buffer B: methanol).

[0153] Peak separation between the 3′-hydroxyl and 3′-aminoxy species is minimal, so data was analysed by extracted mass. Deprotection was found to be complete at pH 5.2 and 5.5, i.e. only 3′-hydroxyl species was detected and there was an absence of 3′-aminoxy species. At pH 5.7 there was significant 3′-aminoxy remaining. At pH 6.75 only 9% 3′-hydroxyl was detected to 91% 3′-aminoxy—indicating a much reduced deprotection efficiency.

1. A method for the synthesis of a plurality of immobilised nucleic acids of differing sequence, comprising:
a. taking a system with a solid support having a plurality of 5′-end immobilised nucleic acids which are 3′-ONH2 protected and a nitrite deprotection solution that is inactive at the basal pH of the system;
b. lowering the pH at a site localized to one or more selected immobilised nucleic acids, thereby activating the deprotection solution to deprotect the 3′-ends of a subset of the immobilised nucleic acids;
c. extending the deprotected 3′-ends of the immobilized nucleic acids using nucleotides with 3′-ONH2 protection and an optionally modified terminal transferase enzyme (TdT);
d. lowering the pH at a site localized to one or more selected immobilised nucleic acids, thereby activating the deprotection solution to deprotect the 3′-ends of a subset of the immobilised nucleic acids, wherein the localized sites are different to those of step b;
e. extending the deprotected 3′-ends of the immobilized nucleic acids using nucleotides with 3′-ONH2 protection and an optionally modified terminal transferase enzyme (TdT), thereby synthesizing a plurality of immobilised nucleic acids of differing sequence.

2. The method of claim 1 comprising the steps of
a. taking a system with a solid support having a plurality of 5′-end immobilised nucleic acids which are 3′-ONH2 protected;
b. adding a nitrite deprotection solution that is inactive at the basal pH of the system;
c. lowering the pH at a site localized to one or more selected immobilised nucleic acids, thereby activating the deprotection solution to deprotect the 3′-ends of a subset of the immobilised nucleic acids;
d. removing the nitrite deprotection solution;
e. extending the deprotected 3′-ends of the immobilized nucleic acids using nucleotides with 3′ -ONH2 protection and an optionally modified terminal transferase enzyme (TdT);
f. adding a nitrite deprotection solution that is inactive at the basal pH of the system;
g. lowering the pH at a site localized to one or more selected immobilised nucleic acids, thereby activating the deprotection solution to deprotect the 3′-ends of a subset of the immobilised nucleic acids, wherein the localized sites are different to those of step c;
h. extending the deprotected 3′-ends of the immobilized nucleic acids using nucleotides with 3′ -ONH₂ protection and an optionally modified terminal transferase enzyme (TdT), thereby synthesizing a plurality of immobilised nucleic acids of differing sequence.

3. The method of claim 1 wherein a different nucleotide solution is added compared to the previous cycle of extension, and the solutions are repeated in cycles to grow differing sequences in differing areas of the solid support.

4. The method of claim 1, wherein the immobilised nucleic acids are single stranded DNA species or double stranded DNA species, with a 3′ overhang, or a mixture thereof.

5. The method of claim 1, wherein the pH change is the result of an electrochemically generated acid (EGA).

6. The method of claim 5, wherein the method used to generate the EGA is selected from: the electrolysis of water or the modulation of a hydroquinone/benzoquinone system.

7. The method of claim 1, wherein the pH change is the result of a photogenerated acid.

8. The method of claim 1, wherein the modified TdT is active at the basal pH of the system and inactive at the altered pH required for deprotection of the 3′-ends of the immobilised nucleic acids.

9. The method of claim 1, wherein the altered pH required for deprotection of the 3′-ends of the immobilised nucleic acids is pH 5.5 or lower.

10. The method of claim 9, wherein basal pH of the system is 7.5 or higher.

11. The method of claim 1, wherein the nitrite solution is buffered.

12. The method of claim 11, wherein the buffer is selected from MES, citrate, phosphate, acetate or a combination thereof.

13. The method according to claim 11 wherein the concentration of buffer is between 500 mM and 2500 mM.

14. The method of claim 1 wherein the nitrite is present at a concentration of between 500-1000 mM.

15. The method of claim 1 wherein the nitrite is sodium nitrite.

16. The method of claim 1, wherein the system comprises alternating anodic and cathodic electrodes.

17. The method of claim 1, wherein each of the plurality of immobilized nucleic acids is extended by at least 25 bases.

18. The method of claim 1, wherein the oligonucleotide sequences are released from being immobilized.

19. A method for the selective deprotection of immobilised nucleic acids, comprising:
a. taking a system comprising:
i. a solid support wherein the solid support has a plurality of immobilised nucleic acids which are 3′-ONH₂ protected;
ii. a nitrite deprotection solution that is inactive at the basal pH of the system; and
b. temporarily lowering the pH at a site localized to one or more selected immobilised nucleic acids, thereby activating the deprotection solution to deprotect the 3′-ends of a subset of the immobilised nucleic acids.

20. A kit for preparing a plurality of immobilised nucleic acids of differing sequence, comprising:
a. a solid support having a plurality of 5′-end immobilised nucleic acids which are 3′-ONH₂ protected;
b. a buffered nitrite deprotection solution that is inactive at the basal pH of the system;
c. nucleotides with 3′-ONH₂ protection; and
d. an optionally modified terminal transferase enzyme (TdT).

The application's sequence listing, which the Patent Office published only in electronic form, follows.

SEQUENCE LISTING (728 sequences)

SEQ ID NO: 1 - protein, 494 aa, Lepisosteus oculatus
MLHIPIFPPIKKRQKLPESRNSCKYEVKFSEVAIFLVERKMGSSRRKFLTNLARSKGFRIEDVLSDAVTHVVAEDNSADELWQWLQNSSLGDLSKIEVLDISWFTECMGAGKPVQVEARHCLVKSCPVIDQYLEPSTVETVSQYACQRRTTMENHNQIFTDAFAILAENAEFNESEGPCLAFMRAASLLKSLPHAISSSKDLEGLPCLGDQTKAVIEDILEYGQCSKVQDVLCDDRYQTIKLFTSVFGVGLKTAEKWYRKGFHSLEEVQADNAIHFTKMQKAGFLYYDDISAAVCKAEAQAIGQIVEETVRLIAPDAIVTLTGGFRRGKECGHDVDFLITTPEMGKEVWLLNRLINRLQNQGILLYYDIVESTFDKTRLPCRKFEAMDHFQKCFAIIKLKKELAAGRVQKDWKAIRVDFVAPPVDNFAFALLGWTGSRQFERDLRRFARHERKMLLDNHALYDKTKKIFLPAKTEEDIFAHLGLDYIDPWQRNA

SEQ ID NO: 2 - protein, 509 aa, Bos taurus
MDPLCTASSGPRKKRPRQVGASMASPPHDIKFQNLVLFILEKKMGTTRRNFLMELARRKGFRVENELSDSVTHIVAENNSGSEVLEWLQVQNIRASSQLELLDVSWLIESMGAGKPVEITGKHQLVVRTDYSATPNPGFQKTPPLAVKKISQYACQRKTTLNNYNHIFTDAFEILAENSEFKENEVSYVTFMRAASVLKSLPFTIISMKDTEGIPCLGDKVKCIIEEIIEDGESSEVKAVLNDERYQSFKLFTSVFGVGLKTSEKWFRMGFRSLSKIMSDKTLKFTKMQKAGFLYYEDLVSCVTRAEAEAVGVLVKEAVWAFLPDAFVTMTGGFRRGKKIGHDVDFLITSPGSAEDEEQLLPKVINLWEKKGLLLYYDLVESTFEKFKLPSRQVDTLDHFQKCFLILKLHHQRVDSSKSNQQEGKTWKAIRVDLVMCPYENRAFALLGWTGSRQFERDIRRYATHERKMMLDNHALYDKTKRVFLKAESEEEIFAHLGLDYIEPWERNA

SEQ ID NO: 3 - protein, 530 aa, Mus musculus
MDPLQAVHLGPRKKRPRQLGTPVASTPYDIRFRDLVLFILEKKMGTTRRAFLMELARRKGFRVENELSDSVTHIVAENNSGSDVLEWLQLQNIKASSELELLDISWLIECMGAGKPVEMMGRHQLVVNRNSSPSPVPGSQNVPAPAVKKISQYACQRRTTLNNYNQLFTDALDILAENDELRENEGSCLAFMRASSVLKSLPFPITSMKDTEGIPCLGDKVKSIIEGIIEDGESSEAKAVLNDERYKSFKLFTSVFGVGLKTAEKWFRMGFRTLSKIQSDKSLRFTQMQKAGFLYYEDLVSCVNRPEAEAVSMLVKEAVVTFLPDALVTMTGGFRRGKMTGHDVDFLITSPEATEDEEQQLLHKVTDFWKQQGLLLYCDILESTFEKFKQPSRKVDALDHFQKCFLILKLDHGRVHSEKSGQQEGKGWKAIRVDLVMCPYDRRAFALLGWTGSRQFERDLRRYATHERKMMLDNHALYDRTKGKTVTISPLDGKVSKLQKALRVFLEAESEEEIFAHLGLDYIEPWERNA

SEQ ID NO: 4 - protein, 494 aa, Artificial Sequence
  Modified TdT Sequences
MLHIPIFPPIKKRQKLPESRNSCKYEVKFSELAIFLVERKMGSSRRKFLTNLARSKGFRIEDVLSDAITHVVAEDNSADELWQWLQNSSLGDLSKIEVLDISWFTECMEAGKPVQVEARHCLVKSCPVIDQYLEPSTVETVSQYACQRRTTMENHNQIFTDAFAILAENAEFNESEDPCLAFRRAASLLKSLPHAISSSKDLEGLPCLGDQTKAVIEDILEYGQCSKVQDVLCDDRYQTIKLFTSVFGVGLKTAEKWYRKGFHSLEEVQADKAIHFTKMQKAGFLYYDDISAAVCKAEADAIGQIVEETVRLIAPDAIVTLTGGFRRGKECGHDVDFLITTPEMGKEVWLLNRLINRLQNQGILLYYDIVESTFDKTRLPCRKFEAMDHFQKCFAIIKLKKELAAGRVQKDWKAIRVDFVMPPVDNFAFALLGWTGSRQFERDLRRFARHERKMLLDNHALYDKTKKIFLPAKTEEDIFAHLGLDYIPPWQRNA

SEQ ID NO: 5 - protein, 494 aa, Artificial Sequence
  Modified TdT Sequences
MLHIPIFPPIKKRQKLPESRNSCKYEVKFSEVAIFLVERKMGSSRRKFLTNLARSKGFRIEDVLSDAVTHVVAEDNSADELWQWLQNSSLGDLSKIEVLDISWFTECMGAGKPVEVEARHCLVKSCPVIDQYLEPSTVETVSQYACQRRTTMENHNQIFTDAFAILAENAEFNESEGPCLAFRRAASLLKSLPHAISSSKDLEGLPCLGDQTKAVIEDILEYGQCSKVQDVLCDDRYQTIKLFTSVFGVGLKTAEKWYRKGFHSLEEVQADNAIHFTKMQKAGFLYYDDISAAVCKAEAQAIGQIVEETVRLIAPDAIVTLTGGFRRGKECGHDVDFLITTPEMGKEVWLLNRLINRLQNQGILLYYDIVESTFDKTRLPCRKFEAMDHFQKCFAIIKLKKELAAGRVQKDWKAIRVDFVAPPVDNFAFALLGWTGSRQFERDLRRWARHERKMLLDNHALYDKTKKIFLPAKTEEDIFAHLGLDYIPPWQRNA

SEQ ID NO: 6 - protein, 494 aa, Artificial Sequence
  Modified TdT Sequences
MLHIPIFPPIKKRQKLPESRNSCKYEVKFSEVAIFLVERKMGSSRRKFLTNLARSKGFRIEDVLSDAVTHVVAEDNSADELWQWLQNSSLGDLSKIEVLDISWFTECMGAGKPVQVEARHCLVKSCPVIDQYLEPSTVETVSQYACQRRTTMENHNQIFTDAFAILAENAEFNESEGPCLAFRRAASLLKSLPHAISSSKDLEGLPCLGDQTKAVIEDILEYGQCSKVQDVLCDDRYQTIKLFTSVFGVGLKTAEKWYRKGFHTLEEVQADNAIHFTKMQKAGFLYYDDISAAVCKAEADAIGQIVEETVRLIAPDAIVTLTGGFRRGKECGHDVDFLITTPEMGKEVWLLNRLINRLQNQGILLYYDIVESTFDKTRLPCRKFEAMDHFQKCFAIIKLKKELAAGRVQKDWKAIRVDFVVCPVDNFAFALLGWTGSRQFERDLRRFARHERKMLLDNHALYDKTKKIFLPAKTEEDIFAHLGLDYIPPWQRNA

SEQ ID NO: 7 - protein, 494 aa, Artificial Sequence
  Modified TdT Sequences
MLHIPIFPPIKKRQKLPESRNSCKYEVKFSELAIFLVERKMGSSRRKFLTNLARSKGFRIEDVLSDAVTHVVAEDNSADELWQWLQNSSLGDLSKIEVLDISWFTECMEAGKPVQVEARHCLVKSCPVIDQYLEPSTVETVSPYACQRRTTMENHNQIFTDAFAILAENAEFNESEGPCLAFRRAASLLKSLPHAISSSKDLEGLPCLGDQTKAVIEDILEYGQCSKVQDVLCDDRYQTIKLFTSVFGVGLKTAEKWYRKGFHSLEEVQADKAIHFTKMQRAGFLYYDDISAAVCKAEADAIGQIVEETVRLIAPDAIVTLTGGFRRGKECGHDVDFLITTPEMGKEVWLLNRLINRLQNQGILLYYDIVESTFDKTRLPCRKFEAMDHFQKCFAIIKLKKELAAGRVQKDWKAIRVDFVMPPVDNFAFALLGWTGSRQFERDLRRFARHERKMLLDNHALYDKTKKIFLPAKTEEDIFAHLGLDYIPPWQRNA

SEQ ID NO: 8 - protein, 494 aa, Artificial Sequence
  Modified TdT Sequences
MLHIPIFPPIKKRQKLPESRNSCKYEVKFSEVAIFLVERKMGSSRRKFLTNLARSKGFRIEDVLSDAVTHVVAEDNSADELWQWLQNSSLGDLSKIEVLDISWFTECMGAGKPVQVEARHCLVKSCPVIDQYLEPSTVETVSQYACQRRTTMENHNQIFTDAFAILAENAEFNESEGPCLAFRRAASLLKSLPHAISSSKDLEGLPCLGDQTKAVIQDILEYGQCSKVQDVLCDDRYQTIKLFTSVFGVGLKTAEKWYRKGFHSLEEVQADNSIHFTKMQKAGFLYYDDISAAVCKAEADAIGQIVEETVRLIAPDAIVTLTGGFRRGKECGHDVDFLITTPEMGKEVWLLNRLINRLQNQGILLYYDIVESTFDKTRLPCRKFEAMDHFQKCFAIIKLKKELAAGRVQKDWKAIRVDFVAPPVDNFAFALLGWTGSRQFERDLRRFARHERKMILDNHALYDKTKKIFLPAKTEEDIFAHLGLDYIPPWQRNA

SEQ ID NO: 9 - protein, 494 aa, Artificial Sequence
  Modified TdT Sequences
MLHIPIFPPIKKRQKLPESRNSCKYEVKFSEVAIFLVERKMGSSRRKFLTNLARSKGFRIEDVLSDAVTHIVAEDNSADELWQWLQNSSLGDLSKIEVLDISWFTECMEAGKPVQVEARHCLVKSCPVIDQYLEPSTVETVSQYACQRRTTMENHNQIFTDAFAILAENAEFNESEGPCLAFRRAASLLKSLPHAISSSKDLEGLPCLGDQTKAVIEDILEYGQCSKVQDVLCDDRYQTIKLFTSVFGVGLKTAEKWYRKGFHSLEEVQADNAIHFTKMQKAGFLYYDDISAAVCKAEADAIGQIVEETVRLIAPDAIVTLTGGFRRGKECGHDVDFLITTPEMGKEVWLLNRLINRLQNQGILLYYDIVESTFDKTRLPCRKFEAMDHFQKCFAIIKLKKELAAGRVQKDWKAIRVDFVAPPVDNFAFALLGWTGSRQFERDLRRFARHEKKMLLDNHALYDKTKKIFLPAKTEEDIFAHLGLDYIPPWQRNA

SEQ ID NO: 10 - protein, 494 aa, Artificial Sequence
  Modified TdT Sequences
MLHIPIFPPIKKRQKLPESRNSCKYEVKFSEIAIFLVERKMGSSRRKFLTNLARSKGFRIEDVLSDAVTHVVAEDNSADELWQWLQNSSLGDLSKIEVLDISWFTECMEAGKPVQVEARHCLVKSCPVIDQYLEPSTVETVSQYACQRRTTMENHNQIFTDAFAILAENAEFNESEGPCLAFRRAASLLKSLPHAISSSKDLEGLPCLGDQTKAVIEDILEYGQCSKVQDVLCDDRYQTIKLFTSVFGVGLKTAEKWYRKGFHSLEEVQADKAIHFTKMQKAGFLYYDDISAAVCKAEADAIGQIVEETVRLIAPDAIVTLTGGFRRGKECGHDVDFLITTPEMGKEVWLLNRLINRLQNQGILLYYDIVESTFDKTRLPCRKFEAMDHFQKCFAIIKLKKELAAGRVQKNWKAIRVDFVMCPVDNFAFALLGWTGSRQFERDLRRFARHERKMLLDNHALYDKTKKIFLPAKTEEDIFAHLGLDYIPPWQRNA

SEQ ID NO: 11 - protein, 494 aa, Artificial Sequence
  Modified TdT Sequences
MLHIPIFPPIKKRQKLPESRNSCKYEVKFSEVAIFLVERKMGSSRRKFLTNLARSKGFRIEDVLSDAVTHVVAEDNSADELWQWLQNSSLGDLSKIEVLDISWFTECMGAGKPVQIEARHCLVKSCPVIDQYLEPSTVETVSQYACQRRTTMENHNQIFTDAFAILAENAEFNESEGPCLAFRRAASLLKSLPHAISSSKDLEGLPCLGDQTKAVIEDILEYGQCSKVQDVLCDDRYQTIKLFTSVFGVGLKTAEKWYRKGFHSLEEVQADNTIHFTKMQKAGFLYYDDISAAVCKAEAQAIGQIVEETVRLIAPDAIVTLTGGFRRGKECGHDVDFLITTPEMGKEVWLLNRLINRLQNQGILLYYDIVESTFDKTRLPCRKFEAMDHFQKCFAIIKLKKELAAGRVQKDWKAIRVDFVAPPVDNFAFALLGWTGSRQFERDLRRFARHERKMLLDNHALYDKTKKIFLPAKTEEDIFAHLGLDYIPPWQRNA

SEQ ID NO: 12 - protein, 494 aa, Artificial Sequence
  Modified TdT Sequences
MLHIPIFPPIKKRQKLPESRNSCKYEVKFSEVAIFLVERKMGSSRRKFLTNLARSKGFRIEDVLSDAVTHVVAEQNSADELWQWLQNSSLGDLSKIEVLDISWFTECMEAGKPVQVEARHCLVKSCPVIDQYLEPSTVETVSQYACQRRTTMENHNQIFTDAFAILAENAEFNESEGPCLAFRRAASLLKSLPHAISSSKDLEGLPCLGDQTKAVIEDILEYGQCSKVQDVLCDDRYQTIKLFTSVFGVGLKTAEKWYRKGFHSLEEVQADKAIHFTKMQKAGFLYYDDISAAVCKAEAQAIGQIVEETVRLIAPDAIVTLTGGFRRGKNCGHDVDFLITTPEMGKEVWLLNRLINRLQNQGILLYYDIVESTFDKTRLPCRKFEAMDHFQKCFAIIKLKKELAAGRVQKDWKAIRVDFVMPPVDNFAFALLGWTGSRQFERDLRRFARHERKMLLDNHALYDKTKKIFLPAKTEEDIFAHLGLDYIPPWQRNA

SEQ ID NO: 13 - protein, 494 aa, Artificial Sequence
  Modified TdT Sequences
MLHIPIFPPIKKRQKLPESRNSCKYEVKFSEVAIFLVERKMGSSRRKFLTNLARSKGFRIEDVLSDAVTHVVAEDNSADELWQWLQNSSLGDLSKIEVLDISWFTECMGAGKPVQVEARHCLVKSCPVIDQYLEPSTVETVSQYACQRRTTMENHNKIFTDAFAILAENAEFNESEGPCLAFRRAASLLKSLPHAISSSKDLEGLPCLGDQTKAVIEDILEYGQCSKVQDVLCDDRYQTIKLFTSVFGVGLKTAEKWYRKGLHSLEEVQADNTIHFTKMQKAGFLYYDDISAAVCKAEADAIGQIVEETVRLIAPDAIVTLTGGFRRGKECGHDVDFLITTPEMGKEVWLLNRLINRLQNQGILLYYDIVESTFDKTRLPCRKFEAMDHFQKCFAIIKLKKELAAGRVQKDWKAIRVDFVAPPVDNFAFALLGWTGSRQFERDLRRFARHERKMLLDNHALYDKTKKIFLPAKTEEDIFAHLGLDYIPPWQRNA

SEQ ID NO: 14 - protein, 494 aa, Artificial Sequence
  Modified TdT Sequences
MLHIPIFPPIKKRQKLPESRNSCKYEVKFSEVVIFLVERKMGSSRRKFLTNLARSKGFRIEDVLSDAVTHVVAEDNSADELWQWLQNSSLGDLSKIEVLDISWFTECMEAGKPVQVEARHCLVKSCPVIDQYLEPSAVETVSQYACQRRTTMENHNQIFTDAFAILAENAEFNESEGPCLAFRRAASLLKSLPHAISSSKDLEGLPCLGDQTKAVIEDILEYGQCSKVQDVLCDDRYQTIKLFTSVFGVGLKTAEKWYRKGFHSLEEVQADKAIHFTKMQRAGFLYYDDISAAVCKAEADAIGQIVEETVRLIAPDAIVTLTGGFRRGKECGHDVDFLITTPEMGKEVWLLNRLINRLQNQGILLYYDIVESTFDKTRLPCRKFEAMDHFQKCFAIIKLKKELAAGRVQKDWKAIRVDFVMPPVDNFAFALLGWTGSRQFERDLRRFARHERKMLLDNHALYDKTKKIFLPAKTEEDIFAHLGLDYIPPWQRNA

SEQ ID NO: 15 - protein, 494 aa, Artificial Sequence
  Modified TdT Sequences
MLHIPIFPPIKKRQKLPESRNSCKYEVKFSEVAIFLVERKMGSSRRKFLTNLARSKGFRIEDVLSDAVTHIVAEDNSADELWQWLQNSSLGDLSKIEVLDISWFTECMGAGKPVQVEARHCLVKSCPVIDQYLEPSTVETVSQYACQRRTTMEHHNQIFTDAFAILAENAEFNESEGPCLAFRRAASLLKSLPHAISSSKDLEGLPCLGDQTKAVIEDILEYGQCSKVQDVLCDDRYQTIKLFTSVFGVGLKTAEKWYRKGFHSLEEVQADNAIHFTKMQKAGFLYYDDISAAVCKAEADAIGQIVEETVRLIAPDAIVTLTGGFRRGKECGHDVDFLITSPEMGKEVWLLNRLINRLQNQGILLYYDIVESTFDKTRLPCRKFEAMDHFQKCFAIIKLKKELAAGRVQKDWKAIRVDFVAPPVDNFAFALLGWTGSRQFERDLRRFARHERKMLLDNHALYDKTKKIFLPAKTEEDIFAHLGLDYIPPWQRNA

SEQ ID NO: 16 - protein, 494 aa, Artificial Sequence
  Modified TdT Sequences
MLHIPIFPPIKKRQKLPESRNSCKYEVKFSEVAIFLVERKMGSSRRKFLTNLARSKGFRIEDVLSDAVTHVVAEDNSADELWQWLQNSSLGDLSKIEVLDISWFTECMGAGKPVQVEARHCLVKSCPVIDQYLEPSTVETVSQYACQRRTTMENHNQIFTDAFAVLAENAEFNESEGPCLAFRRAASLLKSLPHAISSSKDLEGLPCLGDQTKAVIQDILEYGQCSKVQDVLCDDRYQTIKLFTSVFGVGLKTAEKWYRKGFHSLEEVQADNAIHFTKMQKAGFLYYDDISAAVCKAEADAIGQIVEETVRLIAPDAIVTLTGGFRRGKECGHDVDFLITTPEMGKEVWLLNRLINRLQNQGILLYYDIVESTFDKTRLPCRKFEAMDHFQKCFAIIKLKKELAAGRVQKDWKAIRVDFVAPPVDNFAFALLGWTGSRQFERDLRRFARHERKMLLDNHALYDKTKKIFLPAKTEEDIFAHLGLDYIDPWQRNA

SEQ ID NO: 17 - protein, 494 aa, Artificial Sequence
  Modified TdT Sequences
MLHIPIFPPIKKRQKLPESRNSCKYEVKFSEVAIFLVERKMGSSRRAFLTNLARSKGFRIEDVLSDAVTHVVAEQNSADELWQWLQNSSLGDLSKIEVLDISWFTECMGAGKPVQVEARHCLVKSCPVIDQYLEPSTVETVSQYACQRRTTMENHNQIFTDAFAILAENAEFNESEGPCLAFRRAASLLKSLPHAISSSKDLEGLPCLGDQTKAVIEDILEYGQCSKVQDVLCDDRYQTIKLFTSVFGVGLKTAEKWYRKGFHSLEEVQADNAIHFTKMQKAGFLYYDDISAAVCKAEADAIGQIVEETVRLIAPDAIVTLTGGFRRGKECGHDVDFLITTPEMGKEVWLLNRLINRLQNQGILLYYDIVESTFDKTRLPCRKFEAMDHFQKCFAIIKLKKELAAGRVQKDWKAIRVDFVVPPVDNFAFALLGWTGSRQFERDLRRFARHERKMILDNHALYDKTKKIFLPAKTEEDIFAHLGLDYIPPWQRNA

SEQ ID NO: 18 - protein, 494 aa, Artificial Sequence
  Modified TdT Sequences
MLHIPIFPPIKKRQKLPESRNSCKYEVKFSEVAIFLVERKMGSSRRKFLTNLARSKGFRIEDVLSDAVTHVVAEQNSADELWQWLQNSSLGDLSKIEVLDISWFTECMEAGKPVQVEARHCLVKSCPVIDQYLEPSTVETVSQYACQRRTTMENCNQIFTDAFAILAENAEFNESEGPCLAFRRAASLLKSLPHAISSSKDLEGLPCLGDQTKAVIEDILEYGQCSKVQDVLCDDRYQTIKLFTSVFGVGLKTAEKWYRKGFHSLEEVQADKAIHFTKMQKAGFLYYDDISAAVCKAEADAIGQIVEETVRLIAPDAIVTLTGGFRRGKECGHDVDFLITTPEMGKEVWLLNRLINRLQNQGILLYYDIVESTFDKTRLPCRKFEAMDHFQKCFAIIKLKKELAAGRVQKNWKAIRVDFVMPPVDNFAFALLGWTGSRQFERDLRRFARHERKMLLDNHALYDKTKKIFLPAKTEEDIFAHLGLDYIPPWQRNA

SEQ ID NO: 19 - protein, 494 aa, Artificial Sequence
  Modified TdT Sequences
MLHIPIFPPIKKRQKLPESRNSCKYEVKFSEVAIFLVERKMGSSRRKFLTNLARSKGFRIEDVLSDAVTHVVAEDNSADELWQWLQNSSLGDLSKIEVLDISWFTECMEAGKPVQIEARHCLVKSCPVIDQYLEPSTVETVSQYACQRRTTMENHNQIFTDAFAILAENAEFNESEGPCLAFRRAASLLKSLPHAISSSKDLEGLPCLGDQTKAVIEDILEYGQCSKVQDVLCDDRYQTIKLFTSVFGVGLKTAEKWYRKGFHSLEEVQADKAIHFTKMQKAGFLYYDDISAAVCRAEADAIGQIVEETVRLIAPDAIVTLTGGFRRGKECGHDVDFLITTPEMGKEVWLLNRLINRLQNQGILLYYDIVESTFDKTRLPCRKFEAMDHFQKCFAIIKLKKERAAGRVQKDWKAIRVDFVMPPVDNFAFALLGWTGSRQFERDLRRFARHERKMLLDNHALYDKTKKIFLPAKTEEDIFAHLGLDYIPPWQRNA

SEQ ID NO: 20 - protein, 494 aa, Artificial Sequence
  Modified TdT Sequences
MLHIPIFPPIKKRQKLPESRNSCKYEVKFSEVAIFLVERKMGSSRRKFLTNLARSKGFRIEDVLSDAVTHVVAEQNSADELWQWLQNSSLGDLSKIEVLDISWFTECMEAGKPVQVEARHCLVKSCPVIDQYLEPSTVETVSQYACQRRTTMENHNQIFTDAFAILAENAEFNESEGPCLAFRRAASLLKSLPHAISSSKDLEGLPCLGDQTKAVIEDILEYGQCSKVQDVLCDDRYQTIKLFTSVFGVGLKTAEKWYRKGFHSLEEVQADKAIHFTKMQKAGFLYYDDISAAVCKAEADAIGQIVEETVRLIAPDAIVTLTGGFRRGKECGHDVDFLITTPEMGKEVWLLNRLINRLQNKGLLLYYDIVESTFDKTRLPCRKFEAMDHFQKCFAIIKLKKELAAGRVQKDWKAIRVDFVMPPVDNFAFALLGWTGSRQFERDLRRFARHERKMLLDNHALYDKTKKIFLPAKTEEDIFAHLGLDYIPPWQRNA

SEQ ID NO: 21 - protein, 494 aa, Artificial Sequence
  Modified TdT Sequences
MLHIPIFPPIKKRQKLPESRNSCKYEVKFSEVAIFLVERKMGSSRRKFLTNLARSKGFRIEDVLSDAVTHVVAEDNSADELWQWLQNSSLGDLSKIAVLDISWFTECMGAGKPVQVEARHCLVKSCPVIDQYLEPSTVETVSQYACQRRTTMENHNKIFTDAFAILAENAEFNESEGPCLAFRRAASLLKSLPHAISSSKDLEGLPCLGDQTKAVIEDILEYGQCSKVQDVLCDDRYQTIKLFTSVFGVGLKTAEKWYRKGFHSLEEVQADNAIHFTKMQKAGFLYYDDISAAVCKAEADAIGQIVEETVRLIAPDAIVTLTGGFRRGKECGHDVDFLITTPEMGKEVWLLNRLINRLQNQGILLYYDIVESTFDKTRLPCRKFEAMDHFQKCFAIIKLKKELAAGRVQKDWKAIRVDFVAAPVDNFAFALLGWTGSRQFERDLRRFARHERKMLLDNHALYDKTKKIFLPAKTEEDIFAHLGLDYIPPWQRNA

SEQ ID NO: 22 - protein, 494 aa, Artificial Sequence
  Modified TdT Sequences
MLHIPIFPPIKKRQKLPESRNSCKYEVKFSEVAIFLVERKMGSSRRAFLTNLARSKGFRIEDVLSDAVTHVVAEDNSADELWQWLQNSSLGDLSKIEVLDISWFTECMEAGKPVQVEARHCLVKSCPVIDQYLEPSTVETVSQYACQRRTTMENHNQIFTDAFAILAENAEFNESEGPCLAFRRAASLLKSLPHAISSSKDLEGLPCLGDQTKAVIQDILEYGQCSKVQDVLCDDRYQTIKLFTSVFGVGLKTAEKWYRKGFHSLEEVQADNTIHFTKMQKAGFLYYDDISAAVCKAEADAIGQIVEETVRLIAPDAIVTLTGGFRRGKECGHDVDFLITTPEMGKEVWLLNRLINRLQNQGILLYYDIVESTFDKTRLPCRKFEAMDHFQKCFAIIKLKKELAAGRVQKDWKAIRVDFVAPPVDNFAFALLGWTGSRQFERDLRRFARHERKMLLDNHALYDKTKKIFLPAKTEEDIFAHLGLDYIPPWQRNA

SEQ ID NO: 23 - protein, 494 aa, Artificial Sequence
  Modified TdT Sequences
MLHIPIFPPIKKRQKLPESRNSCKYEVKFSEVAIFLVERKMGSSRRKFLTNLARSKGFRIEDVLSDAITHVVAEDNSADELWQWLQNSSLGDLSKIEVLDISWFTECMEAGKPVQVEARHCLVKSCPVIDQYLEPSTVETVSQYACQRRTTMENHNQIFTDAFAILAENAEFNESEGPCLAFRRAASLLKSLPHAISSSKDLEGLPCLGDQTKAVIEDILEYGQCSKVQDVLCDDRYQTIKLFTSVFGVGLKTAEKWYRKGFHSLEEVQADKAIHFTKMQKAGFLYYDDISAAVCKAEADAIGQIVEETVRLIAPDAIVTLTGGFRRGKECGHDVDFLITTPEMGKEVWLLNRLINRLQNQGILLYYDIVESTFDKTRLPCRKFEAMDHFQKCFAIIKLKKERAAGRVQKNWKAIRVDFVMPPVDNFAFALLGWTGSRQFERDLRRFARHERKMLLDNHALYDKTKKIFLPAKTEEDIFAHLGLDYIPPWQRNA

SEQ ID NO: 24 - protein, 494 aa, Artificial Sequence
  Modified TdT Sequences
MLHIPIFPPIKKRQKLPESRNSCKYEVKFSEVAIFLVERKMGSSRRKFLTNLARSKGFRIEDVLSDAVTHVVAEQNSADELWQWLQNSSLGDLSKIEVLDISWFTECMRAGKPVQVEARHCLVKSCPVIDQYLEPSTVETVSQYACQRRTTMENHNQIFTDAFAILAENAEFNESEGPCLAFRRAASLLKSLPHAISSSKDLEGLPCLGDQTKAVIEDILEYGQCSKVQDVLCDDRYQTIKLFTSVFGVGLKTAEKWYRKGFHSLEEVQADKAIHFTKMQKAGFLYYDDISAAVCKAEADAIGQIVEETVRLIAPDAIVTLTGGFRRGKECGHDVDFLITTPEMGKEVWLLNRLINRLQNQGILLYYDIVESTFDKTRLPCRKFEAMDHFQKCFAIIKLKKELAAGRVQKDWKAIRVDFVMCPVDNFAFALLGWTGSRQFERDLRRFARHERKMLLDNHALYDKTKKIFLPAKTEEDIFAHLGLDYIPPWQRNA

SEQ ID NO: 25 - protein, 494 aa, Artificial Sequence
  Modified TdT Sequences
MLHIPIFPPIKKRQKLPESRNSCKYEVKFSEVAIFLVERKMGASRRKFLTNLARSKGFRIEDVLSDAVTHVVAEDNSADELWQWLQNSSLGDLSKIEVLDISWFTECMGAGKPVQVEARHCLVKSCPVIDQYLEPSTVETVSQYACQRRTTMENHNQIFTDAFAILAENAEFNESEGPCLAFRRAASLLKSLPHAISSSKDLEGLPCLGDQTKAVIEDILEYGQCSKVQDVLCDDRYQTIKLFTSVFGVGLKTAEKWYRKGFHSLEEVKADNAIHFTKMQKAGFLYYDDISAAVCKAEADAIGQIVEETVRLIAPDAIVTLTGGFRRGKECGHDVDFLITTPEMGKEVWLLNRLINRLQNQGILLYYDIVESTFDKTRLPCRKFEAMDHFQKCFAIIKLKKELAAGRVQKDWKAIRVDFVVPPVDNFAFALLGWTGSRQFERDLRRFARHERKMLLDNHALYDKTKKIFLPAKTEEDIFAHLGLDYIPPWQRNA

SEQ ID NO: 26 - protein, 494 aa, Artificial Sequence
  Modified TdT Sequences
MLHIPIFPPIKKRQKLPESRNSCKYEVKFSEVAIFLVERKMGSSRRKFLTNLARSKGFRIEDVLSDAVTHVVAEDNSADELWQWLQNSSLGDLSKIEVLDISWFTECMGAGKPVQSEARHCLVKSCPVIDQYLEPSTVETVSQYACQRRTTMEHHNQIFTDAFAILAENAEFNESEGPCLAFRRAASLLKSLPHAISSSKDLEGLPCLGDQTKRVIEDILEYGQCSKVQDVLCDDRYQTIKLFTSVFGVGLKTAEKWYRKGFHSLEEVQADNAIHFTKMQKAGFLYYDDISAAVCKAEADAIGQIVEETVRLIAPDAIVTLTGGFRRGKECGHDVDFLITTPEMGKEVWLLNRLINRLQNQGILLYYDIVESTFDKTRLPCRKFEAMDHFQKCFAIIKLKKELAAGRVQKDWKAIRVDFVAPPVDNFAFALLGWTGSRQFERDLRRFARHERKMLLDNHALYDKTKKIFLPAKTEEDIFAHLGLDYIPPWQRNA

SEQ ID NO: 27 - protein, 494 aa, Artificial Sequence
  Modified TdT Sequences
MLHIPIFPPIKKRQKLPESRNSCKYEVKFSEVAIFLVERKMGSSRRKFLTNLARSKGFRIEDVLSDAVTHVVAEDNSADELWQWLQNSSLGDLSKIEVLDISWFTECMEAGKPVQVEARHCLVKSCPVIDQYLEPSTVETVSQYACQRRTTMENHNQIFTDAFAILAENAEFNESEDPCLAFRRAASLLKSLPHAISSSKDLEGLPCLGDQTKAVIEDILEYGQCSKVQDVLCDDRYQTIKLFTSVFGVGLKTAEKWYRKGFHSLEEVQADKAIHFTKMQRAGFLYYDDISAAVCKAEADAIGQIVEETVRLIAPDAIVTLTGGFRRGKECGHDVDFLITTPEMGKEVWLLNRLINRLQNQGILLYYDIVESTFDKTRLPCRKFEAMDHFQKCFAIIKLKKELAAGRVQKDWKAIRVDFVACPVDNFAFALLGWTGSRQFERDLRRFARHERKMLLDNHALYDKTKKIFLPAKTEEDIFAHLGLDYIPPWQRNA

SEQ ID NO: 28 - protein, 494 aa, Artificial Sequence
  Modified TdT Sequences
MLHIPIFPPIKKRQKLPESRNSCKYEVKFSEVAIFLVERKMGSSRRKFLTNLARSKGFRIEDVLSDAVTHVVAEDNSADELWQWLQNSSLGDLSKIEVLDISWFTECMGAGKPVQVEARHCLVKSCPVIDQYLEPSTVETVSQYACQRRTTMENHNQIFTDAFAILAENAEFNESEGPCLAFRRAASLLKSLPHAISSSKDLEGLPCLGDQTKAVIQDILEYGQCSKVQDVLCDDRYQTIKLFTSVFGVGLKTAEKWYRKGFHSLEEVKADNAIHFTKMQKAGFLYYDDISAAVCKAEADAIGQIVEETVRLIAPDAIVTLTGGFRRGKECGHDVDFLITTPEMGKEVWLLNRLINRLQNQGILLYCDIVESTFDKTRLPCRKFEAMDHFQKCFAIIKLKKELAAGRVQKDWKAIRVDFVAPPVDNFAFALLGWTGSRQFERDLRRFARHERKMLLDNHALYDKTKKIFLPAKTEEDIFAHLGLDYIPPWQRNA

SEQ ID NO: 29 - protein, 494 aa, Artificial Sequence
  Modified TdT Sequences
MLHIPIFPPIKKRQKLPESRNSCKYEVKFSEVAIFLVERKMGSSRRKFLTNLGRSKGFRIEDVLSDAVTHVVAEDNSADELWQWLQNSSLGDLSKIEVLDISWFTECMGAGKPVQVEARHCLVKSCPVIDQYLEPSTVETVSQYACQRRTTMENHNKIFTDAFAILAENAEFNESEGPCLAFRRAASLLKSLPHAISSSKDLEGLPCLGDQTKAVIQDILEYGQCSKVQDVLCDDRYQTIKLFTSVFGVGLKTAEKWYRKGFHSLEEVQADNAIHFTKMQKAGFLYYDDISAAVCKAEADAIGQIVEETVRLIAPDAIVTLTGGFRRGKECGHDVDFLITTPEMGKEVWLLNRLINRLQNQGILLYYDIVESTFDKTRLPCRKFEAMDHFQKCFAIIKLKKELAAGRVQKDWKAIRVDFVMPPVDNFAFALLGWTGSRQFERDLRRFARHERKMLLDNHALYDKTKKIFLPAKTEEDIFAHLGLDYIPPWQRNA

SEQ ID NO: 30 - protein, 494 aa, Artificial Sequence
  Modified TdT Sequences
MLHIPIFPPIKKRQKLPESRNSCKYEVKFSEVAIFLVERKMGSSRRKFLTNLARSKGFRIEDVLSDAVTHVVAEQNSADELWQWLQNSSLGDLSKIEVLDISWFTECMEAGKPVQVEARHCLVKSCPVIDQYLEPSTVETVSQYACQRRTTMENHNQIFTDAFAILAENAEFNESEGPCLAFRRAASLLKSLPHAISSSKDLEGLPCLGDQTKAVIEDILEYGQCSKVQDVLCDDRYQTIKLFTSVFGVGLKTAEKWYRKGFHSLEEVQADKAIHFTKMQKAGFLYYDDISAAVCKAEADAIGQIVEETVRLIAPDAIVTLTGGFRRGKECGHDVDFLITTPEMGKEVWLLNRLINRLQNQGILLYYDIVESTFDKTRLPCRKFEAMDHFQKCFAIIKLKKELAAGRVQKDWKAIRVDFVACPVDRFAFALLGWTGSRQFERDLRRFARHERKMLLDNHALYDKTKKIFLPAKTEEDIFAHLGLDYIPPWQRNA

SEQ ID NO: 31 - protein, 494 aa, Artificial Sequence
  Modified TdT Sequences
MLHIPIFPPIKKRQKLPESRNSCKYEVKFSEVAIFLVERKMGSSRRKFLTNLARSKGFRIEDVLSDAVTHVVAEDNSADELWQWLQNSSLGDLSKIEVLDISWFTECMEAGKPVQVEARHCLVKSCPVIDQYLEPSTVETVSQYACQRRTTMENHNQIFTDAFAILAENAEFNESEGPCLAFRRAASLLKSLPHAISSSKDLEGLPCLGDQTKAVIEDILEYGQCSKVQDVLCDDRYQTIKLFTSVFGVGLKTAEKWYRKGFHSLEEVQADKAIHFTKMQKAGFLYYDDISAAVCKAEADAIGQIVEETVRLIAPDAIVTLTGGFRRGKECGHDVDFLITTPEMGKEVWLLNRLINRLQNQGILLYYDIVESTFDKTRLPCRKFEAMDHFQKCFAIIKLKKELAAGRVQKNWKAIRVDFVLCPVDNFAFALLGWTGSRQFERDLRRFARHERKMLLDNHALYDKTKKIFLPAKTEEDIFAHLGLDYIPPWQRNA

SEQ ID NO: 32 - protein, 494 aa, Artificial Sequence
  Modified TdT Sequences
MLHIPIFPPIKKRQKLPESRNSCKYEVKFSEVAIFLVERKMGSSRRAFLTNLARSKGFRIEDVLSDAVTHVVAEDNSADELWQWLQNSSLGDLSKIEVLDISWFTECMGAGKPVQVEARHCLVKSCPVIDQYLEPSTVETVSQYACQRRTTMENHNQIFTDAFAVLAENAEFNESEGPCLAFRRAASLLKSLPHPISSSKDLEGLPCLGDQTKAVIEDILEYGQCSKVQDVLCDDRYQTIKLFTSVFGVGLKTAEKWYRKGFHSLEEVQADNAIHFTKMQKAGFLYYDDISAAVCKAEADAIGQIVEETVRLIAPDAIVTLTGGFRRGKECGHDVDFLITTPEMGKEVWLLNRLINRLQNQGILLYYDIVESTFDKTRLPCRKFEAMDHFQKCFAIIKLKKELAAGRVQKDWKAIRVDFVAAPVDNFAFALLGWTGSRQFERDLRRFARHERKMLLDNHALYDKTKKIFLPAKTEEDIFAHLGLDYIPPWQRNA

SEQ ID NO: 33 - protein, 494 aa, Artificial Sequence
  Modified TdT Sequences
MLHIPIFPPIKKRQKLPESRNSCKYEVKFSEVAIFLVERKMGASRRKFLTNLARSKGFRIEDVLSDAVTHVVAEDNSADELWQWLQNSSLGDLSKIEVLDISWFTECMGAGKPVQVEARHCLVKSCPVIDQYLEPSTVETVSQYACQRRTTMENHNQIFTDAFAILAENAEFNESEGPCLAFRRAASLLKSLPHAISSSKDLEGLPCLGDQTKAVIEDILEYGQCSKVQDVLCDDRYQTIKLFTSVFGVGLKTAEKWYRKGFHSLEEVQADNAIHFTKMQKAGFLYYDDINAAVCKAEADAIGQIVEETVRLIAPDAIVTLTGGFRRGKECGHDVDFLITTPQMGKEVWLLNRLINRLQNQGILLYYDIVESTFDKTRLPCRKFEAMDHFQKCFAIIKLKKELAAGRVQKDWKAIRVDFVAPPVDNFAFALLGWTGSRQFERDLRRFARHERKMLLDNHALYDKTKKIFLPAKTEEDIFAHLGLDYIPPWQRNA

SEQ ID NO: 34 - protein, 494 aa, Artificial Sequence
  Modified TdT Sequences
MLHIPIFPPIKKRQKLPESRNSCKYEVKFSEVAIFLVERKMGSSRRKFLTNLARSKGFRIEDVLSDAVTHVVAEDNSADELWQWLQNSSLGDLSKIEVLDISWFTECMGAGKPVQVEARHCLVKSCPVIDQYLEPSTVETVSQYACQRRTTMENHNQIFTDAFAILAENAEFNESEGPCLAFRRAASLLKSLPHAISSSKDLEGLPCLGDQTKAVIEDILEYGQCSKVQDVLCDDRYQTIKLFTSVFGVGLKTAEKWYRKGFHTLEEVQADNAIHFTKMQKAGFLYYDDISAAVCKAEADAIGQIVEEAVRLIAPDAIVTLTGGFRRGKECGHDVDFLITSPEMGKEVWLLNRLINRLQNQGILLYYDIVESTFDKTRLPCRKFEAMDHFQKCFAIIKLKKELAAGRVQKDWKAIRVDFVAPPVDNFAFALLGWTGSRQFERDLRRFARHERKMLLDNHALYDKTKKIFLPAKTEEDIFAHLGLDYIPPWQRNA

SEQ ID NO: 35 - protein, 494 aa, Artificial Sequence
  Modified TdT Sequences
MLHIPIFPPIKKRQKLPESRNSCKYEVKFSEVVIFLVERKMGSSRRKFLTNLARSKGFRIEDVLSDAVTHVVAEDNSADELWQWLQNSSLGDLSKIEVLDISWFTECMEAGKPVQVEARHCLVKSCPVIDQYLEPSTVETVSQYACQRRTTMENHNQIFTDAFAILAENAEFNESEDPCLAFRRAASLLKSLPHAISSSRDLEGLPCLGDQTKAVIEDILEYGQCSKVQDVLCDDRYQTIKLFTSVFGVGLKTAEKWYRKGFHSLEEVQADKAIHFTKMQKAGFLYYDDISAAVCKAEADAIGQIVEETVRLIAPDAIVTLTGGFRRGKECGHDVDFLITTPEMGKEVWLLNRLINRLQNQGILLYYDIVESTFDKTRLPCRKFEAMDHFQKCFAIIKLKKELAAGRVQKDWKAIRVDFVMPPVDNFAFALLGWTGSRQFERDLRRFARHERKMLLDNHALYDKTKKIFLPAKTEEDIFAHLGLDYIPPWQRNA

SEQ ID NO: 36 - protein, 494 aa, Artificial Sequence
  Modified TdT Sequences
MLHIPIFPPIKKRQKLPESRNSCKYEVKFSEVAIFLVERKMGSSRRKFLTNLARSKGFRIEDVLSDAVTHVVAENNSADELWQWLQNSSLGDLSKIEVLDISWFTECMGAGKPVQVEARHCLVKSCPVIDQYLEPSTVETVSQYACQRRTTMEHHNQIFTDAFAILAENAEFNESEGPCLAFRRAASLLKSLPHAISSSKDLEGLPCLGDQTKAVIEDILEYGQCSKVQDVLCDDRYQTIKLFTSVFGVGLKTAEKWYRKGFHSLEEVQADNAIHFTKMQKAGFLYYDDISAAVCKAEADAIGQIVEETVRLIAPDAIVTLTGGFRRGKECGHDVDFLITTPQMGKEVWLLNRLINRLQNQGILLYYDIVESTFDKTRLPCRKFEAMDHFQKCFAIIKLKKELAAGRVQKDWKAIRVDFVAPPVDNFAFALLGWTGSRQFERDLRRFARHERKMLLDNHALYDKTKKIFLPAKTEEDIFAHLGLDYIPPWQRNA

SEQ ID NO: 37 - protein, 494 aa, Artificial Sequence
  Modified TdT Sequences
MLHIPIFPPIKKRQKLPESRNSCKYEVKFSEVAIFLVERKMGSSRRKFLTNLARSKGFRIEDVLSDAVTHVVAEDNSADELWQWLQNSSLRDLSKIEVLDISWFTECMEAGKPVQVEARHCLVKSCPVIDQYLEPSTVETVSQYACQRRTTMENHNQIFTDAFAILAENAEFNESEGPCLAFRRAASLLKSLPHAISSSKDLEGLPCLGDQTKAVIEDILEYGQCSKVQDVLCDDRYQTIKLFTSVFGVGLKTAEKWYRKGFHSLEEVQADKAIHFTKMQKAGFLYYDDISAAVCKAEADAIGQIVEETVRLIAPDAIVTLTGGFRRGKECGHDVDFLITTPEMRKEVWLLNRLINRLQNQGILLYYDIVESTFDKTRLPCRKFEAMDHFQKCFAIIKLKKELAAGRVQKDWKAIRVDFVAAPVDNFAFALLGWTGSRQFERDLRRFARHERKMLLDNHALYDKTKKIFLPAKTEEDIFAHLGLDYIPPWQRNA

SEQ ID NO: 38 - protein, 494 aa, Artificial Sequence
  Modified TdT Sequences
MLHIPIFPPIKKRQKLPESRNSCKYEVKFSEVAIFLVERKMGSSRRKFLTNLARSKGFRIEDVLSDAVTHVVAEDNSADELWQWLQNSSLGDLSKIEVLDISWFTECMEAGKPVQVEARHCLVKSCPVIDQYLEPSTVETVSQYACQRRTTMENHNQIFTDAFAILAENAEFNESEGPCVAFRRAASLLKSLPHAISSSKDLEGLPCLGDQSKAVIEDILEYGQCSKVQDVLCDDRYQTIKLFTSVFGVGLKTAEKWYRKGFHSLEEVQADKAIHFTKMQKAGFLYYDDISAAVCKAEADAIGQIVEETVRLIAPDAIVTLTGGFRRGKECGHDVDFLITTPEMGKEVWLLNRLINRLQNQGILLYYDIVESTFDKTRLPCRKFEAMDHFQKCFAIIKLKKELAARRVQKDWKAIRVDFVMPPVDNFAFALLGWTGSRQFERDLRRFARHERKMLLDNHALYDKTKKIFLPAKTEEDIFAHLGLDYIPPWQRNA

SEQ ID NO: 39 - protein, 494 aa, Artificial Sequence
  Modified TdT Sequences
MLHIPIFPPIKKRQKLPESRNSCKYEVKFSEVAIFLVERKMGSSRRKFLTNLARSKGFRIEDVLSDAVTHVVAEQNSADELWQWLQNSSLGDLSKIEVLDISWFTECMEAGKPVQVEARHCLVKSCPVIDQYLEPSTVETVSQYACQRRTTMENHNQIFTDAFAILAENAEFNESEGPCLAFRRAASLLKSLPHAISSSKDLEGLPCLGDQTKAVIEDILEYGQCSKVQDVLCDDRYQTIKLFTSVFGVGLKTAEKWYRKGFHSLEEVQADKAIHFTKMQKAGFLYYDDISAAVCKAEADAIGQIVEETVRLIAPDAIVTLTGGFRRGKECGHDVDFLITTPEMGKEVWLLNRLINRLQNQGILLYYDIVESTFDKTRLPCRKFEAMDHFQKCFAIIKLKKELAAGRVQKDWKAIRVDFVLAPVDNFAFALLGWTGSRQFERDLRRFARHERKMLLDNHALYDKTKKIFLPAKTEEDIFAHLGLDYIPPWQRNA

SEQ ID NO: 40 - protein, 494 aa, Artificial Sequence
  Modified TdT Sequences
MLHIPIFPPIKKRQKLPESRNSCKYEVKFSEIAIFLVERKMGSSRRKFLTNLARSKGFRIEDVLSDAVTHVVAEDNSADELWQWLQNSSLGDLSKIEVLDISWFTECMEAGKPVQVEARHCLVKSCPVIDQYLEPSAVETVSQYACQRRTTMENHNQIFTDAFAILAENAEFNESEGPCLEFRRAASLLKSLPHAISSSKDLEGLPCLGDQTKAVIEDILEYGQCSKVQDVLCDDRYQTIKLFTSVFGVGLKTAEKWYRKGFHSLEEVQADKAIHFTKMQKAGFLYYDDISAAVCKAEADAIGQIVEETVRLIAPDAIVTLTGGFRRGKECGHDVDFLITTPEMGKEVWLLNRLINRLQNQGILLYYDIVESTFDKTRLPCRKFEAMDHFQKCFAIIKLKKELAAGRVQKDWKAIRVDFVMPPVDNFAFALLGWTGSRQFERDLRRFARHERKMLLDNHALYDKTKKIFLPAKTEEDIFAHLGLDYIPPWQRNA

SEQ ID NO: 41 - protein, 494 aa, Artificial Sequence
  Modified TdT Sequences
MLHIPIFPPIKKRQKLPESRNSCKYEVKFSEVAIFLVERKMGSSRRKFLTNLARSKGFRIEDVLSDAVTHVVAEDNSADELWQWLQNSSLGDLSKIEVLDISWFTECMRAGKPVQVEARHCLVKSCPVIDQYLEPSTVETVSQYACQRRTTMENHNQIFTDAFAILAENAEFNESEGPCLAFRRAASLLKSLPHAISSSKDLEGLPCLGDQTKAVIEDILEYGQCSKVQDVLCDDRYQTIKLFTSVFGVGLKTAEKWYRKGFHSLEEVQADKAIHFTKMQKAGFLYYDDISAAVCKAEADAIGQIVEETVRLIAPDAIVTLTGGFRRGKECGHDVDFLITTPEMGKEVWLLQRLINRLQNKGILLYYDIVESTFDKTRLPCRKFEAMDHFQKCFAIIKLKKELAAGRVQKDWKAIRVDFVMPPVDNFAFALLGWTGSRQFERDLRRFARHERKMLLDNHALYDKTKKIFLPAKTEEDIFAHLGLDYIPPWQRNA

SEQ ID NO: 42 - protein, 494 aa, Artificial Sequence
  Modified TdT Sequences
MLHIPIFPPIKKRQKLPESRNSCKYEVKFSEVAIFLVERKMGSSRRKFLTNLARSKGFRIEDVLSDAVTHIVAEDNSADELWQWLQNSSLGDLSKIEVLDISWFTECMGAGKPVQVEARHCLVKSCPVIDQYLEPSTVETVSQYACQRRTTMENHNQIFTDAFAILAENAEFNESEGPCLAFRRAASLLKSLPHAISSSKDLEGLPCLGDQTKRVIEDILEYGQCSKVQDVLCDDRYQTIKLFTSVFGVGLKTAEKWYRKGFHSLEEVQADNAIHFTKMQRAGFLYYDDISAAVCKAEADAIGQIVEETVRLIAPDAIVTLTGGFRRGKECGHDVDFLITTPEMGKEVWLLNRLINRLQNQGILLYYDIVESTFDKTRLPCRKFEAMDHFQKCFAIIKLKKELAAGRVQKDWKAIRVDFVAPPVDNFAFALLGWTGSRQFERDLRRFARHERKMLLDNHALYDKTKKIFLPAKTEEDIFAHLGLDYIPPWQRNA

SEQ ID NO: 43 - protein, 494 aa, Artificial Sequence
  Modified TdT Sequences
MLHIPIFPPIKKRQKLPESRNSCKYEVKFSEVAIFLVERKMGSSRRKFLTNLARSKGFRIEDVLSDAVTHVVAEDNSADELWQWLQNSSLGDLSKIEVLDISWFTECMEAGKPVQVEARHCLVKSCPVIDQYLEPSTVETVSQYACQRRTTMENHNQMFTDAFAILAENAEFNESEGPCLAFRRAASLLKSLPHAISSSKDLEGLPCLGDQTKAVIEDILEYGQCSKVQDVLCDDRYQTIKLFTSVFGVGLKTAEKWYRKGFHSLEEVQADKAIHFTKMQKAGFLYYDDISAAVCKAEAQAIGQIVEETVRLIAPDAIVTLTGGFRRGKECGHDVDFLITTPEMGKEVWLLNRLINRLQNQGILLYYDIVESTFDKTRLPCRKFEAMDHFQKCFAIIKLKKELAAGRVQKDWKAIRVDFVMCPVDNFAFALLGWTGSRQFERDLRRFARHERKMLLDNHALYDKTKKIFLPAKTEEDIFAHLGLDYIPPWQRNA

SEQ ID NO: 44 - protein, 494 aa, Artificial Sequence
  Modified TdT Sequences
MLHIPIFPPIKKRQKLPESRNSCKYEVKFSEVAIFLVERKMGASRRKFLTNLARSKGFRIEDVLSDAVTHVVAEDNSADELWQWLQNSSLGDLSKIEVLDISWFTECMGAGKPVQVEARHCLVKSCPVIDQYLEPSTVETVSQYACQRRTTMENHNQIFTDAFAILAENAEFNESEGPCLAFRRAASLLKSLPHAISSSKDLEGLPCLGDQTKAVIEDILEYGQCSKVQDVLCDDRYQTIKLFTSVFGVGLKTAEKWYRKGLHSLEEVQADNAIHFTKMQKAGFLYYDDISAAVCKAEADAIGQIVEETVRLIAPDAIVTLTGGFRRGKECGHDVDFLITTPEMGKEVWLLNRLINRLQNQGILLYYDIVESTFDKTRLPCRKFEAMDHFQKCFAIIKLKKELAAGRVQKDWKAIRVDFVAPPVDNFAFALLGWTGSRQFERDLRRFARHEKKMLLDNHALYDKTKKIFLPAKTEEDIFAHLGLDYIPPWQRNA

SEQ ID NO: 45 - protein, 494 aa, Artificial Sequence
  Modified TdT Sequences
MLHIPIFPPIKKRQKLPESRNSCKYEVKFSEVAIFLVERKMGSSRRKFLTNLARSKGFRIENVLSDAVTHVVAEQNSADELWQWLQNSSLGDLSKIEVLDISWFTECMEAGKPVQVEARHCLVKSCPVIDQYLEPSTVETVSQYACQRRTTMENHNQIFTDAFAILAENAEFNESEGPCLAFRRAASLLKSLPHAISSSKDLEGLPCLGDQSKAVIEDILEYGQCSKVQDVLCDDRYQTIKLFTSVFGVGLKTAEKWYRKGFHSLEEVQADKAIHFTKMQKAGFLYYDDISAAVCKAEADAIGQIVEETVRLIAPDAIVTLTGGFRRGKECGHDVDFLITTPEMGKEVWLLNRLINRLQNQGILLYYDIVESTFDKTRLPCRKFEAMDHFQKCFAIIKLKKELAAGRVQKDWKAIRVDFVMPPVDNFAFALLGWTGSRQFERDLRRFARHERKMLLDNHALYDKTKKIFLPAKTEEDIFAHLGLDYIPPWQRNA

SEQ ID NO: 46 - protein, 494 aa, Artificial Sequence
  Modified TdT Sequences
MLHIPIFPPIKKRQKLPESRNSCKYEVKFSEVAIFLVERKMGSSRRKFLTNLARSKGFRIEDVLSDAVTHVVAEDNSADELWQWLQNSSLGDLSKIEVLDISWFTECMGAGKPVQVEARHCLVKSCPVIDQYLEPSTVETVSQYACQRRTTMENHNQIFTDAFAILAENAEFNESEGPCLAFRRAASLLKSLPHPISSSKDLEGLPCLGDQTKAVIEDILEYGQCSKVQDVLCDDRYQTIKLFTSVFGVGLKTAEKWYRKGFHSLEEVQADNAIHFTKMQKAGFLYYDDISAAVCKAEAQAIGQIVEETVRLIAPDAIVTLTGGFRRGKECGHDVDFLITTPEMGKEVWLLNRLINRLQNQGILLYCDIVESTFDKTRLPCRKFEAMDHFQKCFAIIKLKKELAAGRVQKDWKAIRVDFVAPPVDNFAFALLGWTGSRQFERDLRRFARHERKMLLDNHALYDKTKKIFLPAKTEEDIFAHLGLDYIPPWQRNA

SEQ ID NO: 47 - protein, 494 aa, Artificial Sequence
  Modified TdT Sequences
MLHIPIFPPIKKRQKLPESRNSCKYEVKFSEVAIFLVERKMGSSRRKFLTNLARSKGFRIEDVLSDAVTHVVAEDNSADELWQWLQNSSLGDLSKIEVLDISWFTECMEAGKPVQVEARHCLVKSCPVIDQYLEPSTVETVSQYACQRRTTMENHNQIFTDAFAILAENAEFNESEGPCLAFRRAASLLKSLPHAISSSKDLEGLPCLGDQTKAVIEDILEYGQCSKVQDVLCDDRYQTIKLFTSVFGVGLKTAEKWYRKGFHSLEEVQADKAIHFTKMQKAGFLYYDDISAAVCKAEADAIGQIVEETVRLIAPDAIVTLTGGFRRGKECGHDVDFLITTPEMGKEVWLLNRLINRLQNQGILLYYDIVESTFDKTRLPCRKFEAMDHFQKCFAIIKLKKELAAGRVQKDWKAIRVDFVMPPVDNFAFALLGWTGSRQFERDLRRFARHERKMLLDNHALYDKTKKIFLPAKTEEDIFAHLGLDYIPPWQRNA

SEQ ID NO: 48 - protein, 494 aa, Artificial Sequence
  Modified TdT Sequences
MLHIPIFPPIKKRQKLPESRNSCKYEVKFSEVAIFLVERKMGSSRRKFLTNLARSKGFRIEDVLSDAVTHVVAEDNSADELWQWLQNSSLGDLSKIEVLDISWFTECMRAGKPVQVEARHCLVKSCPVIDQYLEPSTVETVSQYACQRRTTMENHNQIFTDAFAILAENAEFNESEGPCLAFRRAASLLKSLPHAISSSKDLEGLPCLGDQTKAVIEDILEYGQCSKVQDVLCDDRYQTIKLFTSVFGVGLKTAEKWYRKGFHSLEEVQADKAIHFTKMQKAGFLYYDDISAAVCKAEADAIGQIVEETVRLIAPDAIVTLTGGFRRGKECGHDVDFLITTPEMGKEVWLLNRLINRLQNQGILLYYDIVESTFDKTRLPCRKFEAMDHFQKCFAIIKLKKELAAGRVQKDWKAIRVDFVLPPVDRFAFALLGWTGSRQFERDLRRFARHERKMLLDNHALYDKTKKIFLPAKTEEDIFAHLGLDYIPPWQRNA

SEQ ID NO: 49 - protein, 494 aa, Artificial Sequence
  Modified TdT Sequences
MLHIPIFPPIKKRQKLPESRNSCKYEVKFSEVAIFLVERKMGSSRRKFLTNLARSKGFRIEDVLSDAVTHVVAEDNSADELWQWLQNSSLGDLSKIEVLDVSWFTECMEAGKPVQVEARHCLVKSCPVIDQYLEPSTVETVSQYACQRRTTMENHNQIFTDAFAILAENAEFNESEGPCLAFRRAASLLKSLPHAISSSKDLEGLPCLGDQTKAVIEDILEYGQCSKVQDVLCDDRYQTIKLFTSVFGVGLKTAEKWYRKGFHSLEEVQADNAIHFTKMQKAGFLYYDDISAAVCKAEADAIGQIVEETVRLIAPDAIVTLTGGFRRGKECGHDVDFLITTPEMGKEVWLLNRLINRLQNQGILLYYDIVESTFDKTRLPCRKFEAMDHFQKCFAIIKLKKELAAGRVQKDWKAIRVDFVMCPVDNFAFALLGWTGSRQFERDLRRFARHERKMLLDNHALYDKTKKIFLPAKTEEDIFAHLGLDYIPPWQRNA

SEQ ID NO: 50 - protein, 494 aa, Artificial Sequence
  Modified TdT Sequences
MLHIPIFPPIKKRQKLPESRNSCKYEVKFSEVAIFLVERKMGSSRRKFLTNLARSKGFRIEDVLSDAVTHVVAEQNSADELWQWLQNSSLGDLSKIEVLDISWFTECMGAGKPVQVEARHCLVKSCPVIDQYLEPSTVETVSQYACQRRTTMENHNQIFTDAFAILAENAEFNESEGPCLAFRRAASLLKSLPHAISSSKDLEGLPCLGDQTKAVIEDILEYGQCSKVQDVLCDDRYQSIKLFTSVFGVGLKTAEKWYRKGFHSLEEVQADNAIHFTKMQKAGFLYYDDISAAVCKAEAQAIGQIVEETVRLIAPDAIVTLTGGFRRGKECGHDVDFLITTPEMGKEVWLLNRLINRLQNQGILLYYDIVESTFDKTRLPCRKFEAMDHFQKCFAIIKLKKELAAGRVQKDWKAIRVDFVAPPVDNFAFALLGWTGSRQFERDLRRFARHERKMLLDNHALYDKTKKIFLPAKTEEDIFAHLGLDYIPPWQRNA

SEQ ID NO: 51 - protein, 494 aa, Artificial Sequence
  Modified TdT Sequences
MLHIPIFPPIKKRQKLPESRNSCKYEVKFSEVAIFLVERKMGASRRKFLTNLGRSKGFRIEDVLSDAVTHVVAEDNSADELWQWLQNSSLGDLSKIEVLDISWFTECMEAGKPVQVEARHCLVKSCPVIDQYLEPSTVETVSQYACQRRTTMENHNQIFTDAFAILAENAEFNESEGPCLAFRRAASLLKSLPHAISSSKDLEGLPCLGDQTKAVIEDILEYGQCSKVQDVLCDDRYQTIKLFTSVFGVGLKTAEKWYRKGFHSLEEVQADNAIHFTKMQKAGFLYYDDISAAVCKAEADAIGQIVEETVRLIAPDAIVTLTGGFRRGKECGHDVDFLITSPEMGKEVWLLNRLINRLQNQGILLYYDIVESTFDKTRLPCRKFEAMDHFQKCFAIIKLKKELAAGRVQKDWKAIRVDFVAPPVDNFAFALLGWTGSRQFERDLRRFARHERKMLLDNHALYDKTKKIFLPAKTEEDIFAHLGLDYIPPWQRNA

SEQ ID NO: 52 - protein, 494 aa, Artificial Sequence
  Modified TdT Sequences
MLHIPIFPPIKKRQKLPESRNSCKYEVKFSEVAIFLVERKMGSSRRKFLTNLARSKGFRIEDVLSDAVTHVVAEDNSADELWQWLQNSSLRDLSKIEVLDISWFTECMEAGKPVQVEARHCLVKSCPVIDQYLEPSTVETVSQYACQRRTTMENHNQIFTDAFAILAENAEFNESEGPCLAFRRAASLLKSLPHAISSSKDLEGLPCLGDQSKAVIEDILEYGQCSKVQDVLCDDRYQTIKLFTSVFGVGLKTAEKWYRKGFHSLEEVQADKAIHFTKMQKAGFLYYDDISAAVCKAEADAIGQIVEETVRLIAPDAIVTLTGGFRRGKECGHDVDFLITTPEMGKEVWLLNRLINRLQNQGILLYYDIVESTFDKTRLPCRKFEAMDHFQKCFAIIKLKKELAAGRVQKDWKAIRVDFVMCPVDNFAFALLGWTGSRQFERDLRRFARHERKMLLDNHALYDKTKKIFLPAKTEEDIFAHLGLDYIPPWQRNA

SEQ ID NO: 53 - protein, 494 aa, Artificial Sequence
  Modified TdT Sequences
MLHIPIFPPIKKRQKLPESRNSCKYEVKFSEVAIFLVERKMGSSRRKFLTNLARSKGFRIEDVLSDAVTHVVAEDNSADELWQWLQNSSLGDLSKIEVLDISWFTECMGAGKPVQVEARHCLVKSCPVIDQYLEPSTVETVSQYACQRRTTMENHNQIFTDAFAILAENAEFNESEGPCLAFRRAASLLKSLPHPISSSKDLEGLPCLGDQSKAVIEDILEYGQCSKVQDVLCDDRYQTIKLFTSVFGVGLKTAEKWYRKGLHSLEEVQADNAIHFTKMQKAGFLYYDDISAAVCKAEADAIGQIVEETVRLIAPDAIVTLTGGFRRGKECGHDVDFLITTPEMGKEVWLLNRLINRLQNQGILLYYDIVESTFDKTRLPCRKFEAMDHFQKCFAIIKLKKELAAGRVQKDWKAIRVDFVAPPVDNFAFALLGWTGSRQFERDLRRFARHERKMLLDNHALYDKTKKIFLPAKTEEDIFAHLGLDYIPPWQRNA

SEQ ID NO: 54 - protein, 494 aa, Artificial Sequence
  Modified TdT Sequences
MLHIPIFPPIKKRQKLPESRNSCKYEVKFSEVAIFLVERKMGSSRRKFLTNLARSKGFRIEDVLSDAVTHVVAEDNSADELWQWLQNSSLGDLSKIEVLDISWFTECMGAGKPVQVEARHCLVKSCPVIDQYLEPSTVETVSQYACQRRTTMENHNQIFTDAFAILAENAEFNESEGPCLAFMRAASLLKSLPHAISSSKDLEGLPCLGDQTKAVIEDILEYGQCSKVQDVLCDDRYQTIKLFTSVFGVGLKTAEKWYRKGFHSLEEVQADNAIHFTKMQKAGFLYYDDISAAVCKAEAQAIGQIVEETVRLIAPDAIVTLTGGFRRGKECGHDVDFLITTPEMGKEVWLLNRLINRLQNQGILLYYDIVESTFDKTRLPCRKFEAMDHFQKCFAIIKLKKELAAGRVQKDWKAIRVDFVAPPVDNFAFALLGWTGSRQFERDLRRFARHEKKMLLDNHALYDKTKKIFLPAKTEEDIFAHLGLDYIPPWQRNA

SEQ ID NO: 55 - protein, 494 aa, Artificial Sequence
  Modified TdT Sequences
MLHIPIFPPIKKRQKLPESRNSCKYEVKFSEVAIFLVERKMGSSRRKFLTNLARSKGFRIEDVLSDAVTHVVAEDNSADELWQWLQNSSLGDLSKIEVLDVSWFTECMEAGKPVQVEARHCLVKSCPVIDQYLEPSTVETVSQYACQRRTTMENHNRIFTDAFAILAENAEFNESEGPCLAFRRAASLLKSLPHAISSSKDLEGLPCLGDQTKAVIEDILEYGQCSKVQDVLCDDRYQTIKLFTSVFGVGLKTAEKWYRKGFHSLEEVQADKAIHFTKMQKAGFLYYDDISAAVCKAEADAIGQIVEETVRLIAPDAIVTLTGGFRRGKECGHDVDFLITTPEMGKEVWLLNRLINRLQNQGILLYYDIVESTFDKTRLPCRKFEAMDHFQKCFAIIKLKKELAAGRVQKDWKAIRVDFVMAPVDNFAFALLGWTGSRQFERDLRRFARHERKMLLDNHALYDKTKKIFLPAKTEEDIFAHLGLDYIPPWQRNA

SEQ ID NO: 56 - protein, 494 aa, Artificial Sequence
  Modified TdT Sequences
MLHIPIFPPIKKRQKLPESRNSCKYEVKFSEVAIFLVERKMGSSRRKFLTNLARSKGFRIEDVLSDAVTHVVAEDNSADELWQWLQNSSLGDLSKIEVLDISWFTECMEAGKPVQVEARHCLVKSCPVIDQYLEPSTVETVSQYACQRRTTMENHNQIFTDAFAILAENAEFNESEGPCLEFRRAASLLKSLPHAISSSKDLEGLPCLGDQTKAVIEDILEYGQCSKVQDVLCDDRYQTIKLFTSVFGVGLKTAEKWYRKGFHSLEEVQADNAIHFTKMQKAGFLYYDDISAAVCKAEADAIGQIVEETVRLIAPDAIVTLTGGFRRGKECGHDVDFLITTPEMGKEVWLLNRLINRLQNQGILLYYDIVESTFDKTRLPCRKFEAMDHFQKCFAIIKLKKELAAGRVQKDWKAIRVDFVAAPVDNFAFALLGWTGSRQFERDLRRFARHERKMLLDNHALYDKTKKIFLPAKTEEDIFAHLGLDYIPPWQRNA

SEQ ID NO: 57 - protein, 494 aa, Artificial Sequence
  Modified TdT Sequences
MLHIPIFPPIKKRQKLPESRNSCKYEVKFSEVAIFLVERKMGSSRRKFLTNLARSKGFRIEDVLSDAVTHVVAEDNSADELWQWLQNSSLGDLSKIEVLDISWFTECMEAGKPVQVEARHCLVKSCPVIDQYLEPSTVETVSQYACQRRTTMENHNQIFTDAFAILAENAEFNESEGPCLAFRRAASLLKSLPHAISSSKDLEGLPCLGDQSKAVIEDILEYGQCSKVQDVLCDDRYQTIKLFTSVFGVGLKTAEKWYRKGFHSLEEVQADNAIHFTKMQKAGFLYYDDISAAVCKAEADAIGQIVEETVRLIAPDAIVTLTGGFRRGKECGHDVDFLITTPEMGKEVWLLNRLINRLQNKGILLYYDIVESTFDKTRLPCRKFEAMDHFQKCFAIIKLKKELAAGRVQKDWKAIRVDFVMPPVDNFAFALLGWTGSRQFERDLRRFARHERKMLLDNHALYDKTKKIFLPAKTEEDIFAHLGLDYIPPWQRNA

SEQ ID NO: 58 - protein, 494 aa, Artificial Sequence
  Modified TdT Sequences
MLHIPIFPPIKKRQKLPESRNSCKYEVKFSEVAIFLVERKMGSSRRKFLTNLARSKGFRIEDVLSDAVTHVVAEDNSADELWQWLQNSSLGDLSKIAVLDISWFTECMGAGKPVQVEARHCLVKSCPVIDQYLEPSTVETVSQYACQRRTTMENHNQIFTDAFAILAENAEFNESEGPCLAFRRAASLLKSLPHAISSSKDLEGLPCLGDQTSAVIEDILEYGQCSKVQDVLCDDRYQTIKLFTSVFGVGLKTAEKWYRKGFHTLEEVQADNAIHFTKMQKAGFLYYDDISAAVCKAEADAIGQIVEETVRLIAPDAIVTLTGGFRRGKECGHDVDFLITTPEMGKEVWLLNRLINRLQNQGILLYYDIVESTFDKTRLPCRKFEAMDHFQKCFAIIKLKKELAAGRVQKDWKAIRVDFVAPPVDNFAFALLGWTGSRQFERDLRRFARHERKMLLDNHALYDKTKKIFLPAKTEEDIFAHLGLDYIPPWQRNA

SEQ ID NO: 59 - protein, 494 aa, Artificial Sequence
  Modified TdT Sequences
MLHIPIFPPIKKRQKLPESRNSCKYEVKFSEVAIFLVERKMGSSRRAFLTNLARSKGFRIEDVLSDAVTHVVAENNSADELWQWLQNSSLGDLSKIEVLDISWFTECMGAGKPVQVEARHCLVKSCPVIDQYLEPSTVETVSQYACQRRTTMENHNQIFTDAFAILAENAEFNESEGPCLAFRRAASLLKSLPHAISSSKDLEGLPCLGDQTKAVIEDILEYGQCSKVQDVLCDDRYQTIKLFTSVFGVGLKTAEKWYRKGFHSLEEVQADNSIHFTKMQKAGFLYYDDISAAVCKAEADAIGQIVEETVRLIAPDAIVTLTGGFRRGKECGHDVDFLITTPEMGKEVWLLNRLINRLQNQGILLYYDIVESTFDKTRLPCRKFEAMDHFQKCFAIIKLKKELAAGRVQKDWKAIRVDFVAPPVDNFAFALLGWTGSRQFERDLRRFARHERKMLLDNHALYDKTKKIFLPAKTEEDIFAHLGLDYIPPWQRNA

SEQ ID NO: 60 - protein, 494 aa, Artificial Sequence
  Modified TdT Sequences
MLHIPIFPPIKKRQKLPESRNSCKYEVKFSEVAIFLVERKMGSSRRKFLTNLARSKGFRIEDVLSDAVTHVVAEDNSADELWQWLQNSSLGDLSKIEVLDISWFTECMEAGKPVQVEARHCLVKSCPVIDQYLEPSTVETVSQYACQRRTTMENHNQIFTDAFAILAENAEFNESEGPCLAFRRAASLLKSLPHAISSSKDLEGLPCLGDQTKAVIEDILEYGQCSKVQDVLCDDRYQTIKLFTSVFGVGLKTAEKWYRKGFHSLEEVQADKAIHFTKMQKAGFLYYDDISAAVCKAEADAIGQIVEETVRLIAPDAIVTLTGGFRRGKECGHDVDFLITTPEMGKEVWLLNRLINRLQNQGILLYYDIVESTFDKTRLPCRKFEAMDHFQKCFAIIKLKKELAAGRVQKDWKAIRVDFVMPPVDNFAFALLGWTGSRQFERDLRRFARHERKMLLDRHALYDKTKKIFLPAKTEEDIFAHLGLDYIPPWQRNA

SEQ ID NO: 61 - protein, 494 aa, Artificial Sequence
  Modified TdT Sequences
MLHIPIFPPIKKRQKLPESRNSCKYEVKFSEVAIFLVERKMGSTRRKFLTNLARSKGFRIEDVLSDAVTHVVAEDNSADELWQWLQNSSLGDLSKIEVLDISWFTECMEAGKPVQVEARHCLVKSCPVIDQYLEPSTVETVSQYACQRRTTMENHNQIFTDAFAILAENAEFNESEGPCLAFRRAASLLKSLPHAISSSKDLEGLPCLGDQTKAVIEDILEYGQCSKVQDVLCDDRYQTIKLFTSVFGVGLKTAEKWYRKGFHSLEEVQADKAIHFTKMQKAGFLYYDDISAAVCKAEADAIGQIVEETVRLIAPDAIVTLTGGFRRGKECGHDVDFLITTPEMGKEVWLLNRLINRLQKQGILLYYDIVESTFDKTRLPCRKFEAMDHFQKCFAIIKLKKELAAGRVQKDWKAIRVDFVMPPVDNFAFALLGWTGSKQFERDLRRFARHERKMLLDNHALYDKTKKIFLPAKTEEDIFAHLGLDYIPPWQRNA

SEQ ID NO: 62 - protein, 494 aa, Artificial Sequence
  Modified TdT Sequences
MLHIPIFPPIKKRQKLPESRNSCKYEVKFSEVAIFLVERKMGSSRRKFLTNLARSKGFRIEDVLSDAVTHVVAEQNSADELWQWLQNSSLGDLSKIEVLDISWFTECMEAGKPVQVEARHCLVKRCPVIDQYLEPSTVETVSQYACQRRTTMENHNQIFTDAFAILAENAEFNESEGPCLAFRRAASLLKSLPHAISSSKDLEGLPCLGDQTKAVIEDILEYGQCSKVQDVLCDDRYQTIKLFTSVFGVGLKTAEKWYRKGFHSLEEVQADKAIHFTKMQKAGFLYYDDISAAVCKAEADAIGQIVEETVRLIAPDAIVTLTGGFRRGKECGHDVDFLITTPEMGKEVWLLNRLINRLQNQGILLYYDIVESTFDKTRLPCRKFEAMDHFQKCFAIIKLKKELAAGRVQKDWKAIRVDFVMCPVDNFAFALLGWTGSRQFERDLRRFARHERKMLLDNHALYDKTKKIFLPAKTEEDIFAHLGLDYIPPWQRNA

SEQ ID NO: 63 - protein, 494 aa, Artificial Sequence
  Modified TdT Sequences
MLHIPIFPPIKKRQKLPESRNSCKYEVKFSEVAIFLVERKMGSSRRKFLTNLARSKGFRIEDVLSDAVTHVVAENNSADELWQWLQNSSLGDLSKIEVLDISWFTECMGAGKPVQVEARHCLVKSCPVIDQYLEPSTVETVSQYACQRRTTMENHNQIFTDAFAILAENAEFNESEGPCLAFRRAASLLKSLPHAISSSKDLEGLPCLGDQTKAVIEDILEYGQCSKVQDVLCDDRYQTIKLFTSVFGVGLKTAEKWYRKGFHSLEEVQADNTIHFTKMQKAGFLYYDDISAAVCKAEADAIGQIVEEAVRLIAPDAIVTLTGGFRRGKECGHDVDFLITTPEMGKEVWLLNRLINRLQNQGILLYYDIVESTFDKTRLPCRKFEAMDHFQKCFAIIKLKKELAAGRVQKDWKAIRVDFVMPPVDNFAFALLGWTGSRQFERDLRRFARHERKMLLDNHALYDKTKKIFLPAKTEEDIFAHLGLDYIPPWQRNA

SEQ ID NO: 64 - protein, 494 aa, Artificial Sequence
  Modified TdT Sequences
MLHIPIFPPIKKRQKLPESRNSCKYEVKFSEVAIFLVERKMGSSRRKFLTNLARSKGFRIEDVLSDAVTHVVAEDNSADELWQWLQNSSLGDLSKIEVLDISWFTECMEAGKPVQVEARHCLVKSCPVIDQYLEPSTVETVSQYACQRRTTMENHNQIFTDAFAILAENAEFNESEDPCLAFRRAASLLKSLPHAISSSKDLEGLPCLGDQTKAVIEDILEYGQCSKVQDVLCDDRYQTIKLFTSVFGVGLKTAEKWYRKGFHSLEEVQADNAIHFTKMQKAGFLYYDDISAAVCKAEADAIGQIVEETVRLIAPDAIVTLTGGFRRGKECGHDVDFLITTPEMGKEVWLLQRLINRLQNQGILLYYDIVESTFDKTRLPCRKFEAMDHFQKCFAIIKLKKELAAGRVQKDWKAIRVDFVMPPVDNFAFALLGWTGSRQFERDLRRFARHERKMLLDNHALYDKTKKIFLPAKTEEDIFAHLGLDYIPPWQRNA

SEQ ID NO: 65 - protein, 494 aa, Artificial Sequence
  Modified TdT Sequences
MLHIPIFPPIKKRQKLPESRNSCKYEVKFSEVAIFLVERKMGSSRRKFLTNLARSKGFRIEDVLSDAVTHVVAEDNSADELWQWLQNSSLGDLSKIEVLDISWFTECMEAGKPVQVEARHCLVKSCPVIDQYLEPSTVETVSPYACQRRTTMENHNQIFTDAFAILAENAEFNESEGPCLAFRRAASLLKSLPHAISSSRDLEGLPCLGDQTKAVIEDILEYGQCSKVQDVLCDDRYQTIKLFTSVFGVGLKTAEKWYRKGFHSLEEVQADKAIHFTKMQKAGFLYYDDISAAVCKAEAQAIGQIVEETVRLIAPDAIVTLTGGFRRGKECGHDVDFLITTPEMGKEVWLLNRLINRLQNQGILLYYDIVESTFDKTRLPCRKFEAMDHFQKCFAIIKLKKELAAGRVQKDWKAIRVDFVMPPVDNFAFALLGWTGSRQFERDLRRFARHERKMLLDNHALYDKTKKIFLPAKTEEDIFAHLGLDYIPPWQRNA

SEQ ID NO: 66 - protein, 494 aa, Artificial Sequence
  Modified TdT Sequences
MLHIPIFPPIKKRQKLPESRNSCKYEVKFSEVAIFLVERKMGSSRRKFLTNLARSKGFRIEDVLSDAVTHVVAEDNSADELWQWLQNSSLGDLSKIEVLDISWFTECMEAGKPVQVEARHCLVKSCPVIDQYLEPSTVETVSQYACQRRTTMENCNQIFTDAFAILAENAEFNESEGPCLAFRRAASLLKSLPHAISSSKDLEGLPCLGDQSKAVIEDILEYGQCSKVQDVLCDDRYQTIKLFTSVFGVGLKTAEKWYRKGFHSLEEVQADKAIHFTKMQKAGFLYYDDISAAVCKAEADAIGQIVEETVRLIAPDAIVTLTGGFRRGKECGHDVDFLITTPEMGKEVWLLNRLINRLQNQGILLYYDIVESTFDKTRLPCRKFEAMDHFQKCFAIIKLKKELAAGRVQKDWKAIRVDFVMAPVDNFAFALLGWTGSRQFERDLRRFARHERKMLLDNHALYDKTKKIFLPAKTEEDIFAHLGLDYIPPWQRNA

SEQ ID NO: 67 - protein, 494 aa, Artificial Sequence
  Modified TdT Sequences
MLHIPIFPPIKKRQKLPESRNSCKYEVKFSEVAIFLVERKMGSSRRKFLTNLARSKGFRIEDVLSDAVTHVVAEDNSADELWQWLQNSSLGDLSKIEVLDISWFTECMGAGKPVQIEARHCLVKSCPVIDQYLEPSTVETVSQYACQRRTTMENHNQIFTDAFAILAENAEFNESEGPCLAFRRAASLLKSLPHAISSSKDLEGLPCLGDQTKAVIEDILEYGQCSKVQDVLCDDRYQTIKLFTSVFGVGLKTAEKWYRKGFHSLEEVQADNAIHFTKMQKAGFLYYDDISAAVCKAEADAIGQIVEETVRLIAPDAIVTLTGGFRRGKECGHDVDFLITTPQMGKEVWLLNRLINRLQNQGILLYYDIVESTFDKTRLPCRKFEAMDHFQKCFAIIKLKKELAAGRVQKDWKAIRVDFVAPPVDNFAFALLGWTGSRQFERDLRRFARHEKKMLLDNHALYDKTKKIFLPAKTEEDIFAHLGLDYIPPWQRNA

SEQ ID NO: 68 - protein, 494 aa, Artificial Sequence
  Modified TdT Sequences
MLHIPIFPPIKKRQKLPESRNSCKYEVKFSEVAIFLVERKMGSSRRKFLTNLARSKGFRIEDVLSDAVTHVVAEDNSADELWQWLQNSSLGDLSKIEVLDISWFTECMGAGKPVQVEARHCLVKSCPVIDQYLEPSTVETVSQYACQRRTTMENHNQIFTDAFAILAENAEFNESEGPCLAFRRAASLLKSLPHAISSSKDLEGLPCLGDQSKAVIEDILEYGQCSKVQDVLCDDRYQTIKLFTSVFGVGLKTAEKWYRKGFHSLEEVQADNAIHFTKMQRAGFLYYDDISAAVCKAEADAIGQIVEETVRLIAPDAIVTLTGGFRRGKECGHDVDFLITTPEMGKEVWLLNRLINRLQNQGILLYYDIVESTFDKTRLPCRKFEAMDHFQKCFAIIKLKKELAAGRVQKDWKAIRVDFVVPPVDNFAFALLGWTGSRQFERDLRRFARHERKMLLDNHALYDKTKKIFLPAKTEEDIFAHLGLDYIPPWQRNA

SEQ ID NO: 69 - protein, 494 aa, Artificial Sequence
  Modified TdT Sequences
MLHIPIFPPIKKRQKLPESRNSCKYEVKFSEVAIFLVERKMGSSRRKFLTNLGRSKGFRIEDVLSDAVTHVVAEDNSADELWQWLQNSSLGDLSKIEVLDISWFTECMGAGKPVQVEARHCLVKSCPVIDQYLEPSTVETVSQYACQRRTTMENHNQIFTDAFAILAENAEFNESEGPCLAFMRAASLLKSLPHPISSSKDLEGLPCLGDQTSAVIEDILEYGQCSKVQDVLCDDRYQTIKLFTSVFGVGLKTAEKWYRKGFHSLEEVQADNAIHFTKMQKAGFLYYDDISAAVCKAEADAIGQIVEETVRLIAPDAIVTLTGGFRRGKECGHDVDFLITTPEMGKEVWLLNRLINRLQNQGILLYYDIVESTFDKTRLPCRKFEAMDHFQKCFAIIKLKKELAAGRVQKDWKAIRVDFVAPPVDNFAFALLGWTGSRQFERDLRRFARHERKMLLDNHALYDKTKKIFLPAKTEEDIFAHLGLDYIPPWQRNA

SEQ ID NO: 70 - protein, 494 aa, Artificial Sequence
  Modified TdT Sequences
MLHIPIFPPIKKRQKLPESRNSCKYEVKFSEVAIFLVERKMGSSRRKFLTNLARSKGFRIEDVLSDAVTHVVAEDNSADELWQWLQNSSLGDLSKIEVLDISWFTECMEAGKPVQIEARHCLVKSCPVIDQYLEPSTVETVSQYACQRRTTMENHNQIFTDAFAILAENAEFNESEGPCLAFRRAASLLKSLPHAISSSKDLEGLPCLGDQTKAVIEDILEYGQCSKVQDVLCDDRYQTIKLFTSVFGVGLKTAEKWYRKGFHSLEEVQADKAIHFTKMQRAGFLYYDDISAAVCKAEADAIGQIVEETVRLIAPDAIVTLTGGFRRGKECGHDVDFLITTPEMRKEVWLLNRLINRLQNQGILLYYDIVESTFDKTRLPCRKFEAMDHFQKCFAIIKLKKELAAGRVQKDWKAIRVDFVMPPVDNFAFALLGWTGSRQFERDLRRFARHERKMLLDNHALYDKTKKIFLPAKTEEDIFAHLGLDYIPPWQRNA

SEQ ID NO: 71 - protein, 494 aa, Artificial Sequence
  Modified TdT Sequences
MLHIPIFPPIKKRQKLPESRNSCKYEVKFSELAIFLVERKMGSSRRKFLTNLARSKGFRIEDVLSDAVTHVVAEDNSADELWQWLQNSSLGDLSKIEVLDVSWFTECMEAGKPVQVEARHCLVKSCPVIDQYLEPSTVETVSQYACQRRTTMENHNQMFTDAFAILAENAEFNESEGPCLAFRRAASLLKSLPHAISSSKDLEGLPCLGDQTKAVIEDILEYGQCSKVQDVLCDDRYQTIKLFTSVFGVGLKTAEKWYRKGFHSLEEVQADKAIHFTKMQKAGFLYYDDISAAVCKAEADAIGQIVEETVRLIAPDAIVTLTGGFRRGKECGHDVDFLITTPEMGKEVWLLNRLINRLQNQGILLYYDIVESTFDKTRLPCRKFEAMDHFQKCFAIIKLKKELAAGRVQKDWKAIRVDFVMPPVDNFAFALLGWTGSRQFERDLRRFARHERKMLLDNHALYDKTKKIFLPAKTEEDIFAHLGLDYIPPWQRNA

SEQ ID NO: 72 - protein, 494 aa, Artificial Sequence
  Modified TdT Sequences
MLHIPIFPPIKKRQKLPESRNSCKYEVKFSEVAIFLVERKMGSSRRKFLTNLARSKGFRIEDVLSDAVTHVVAEDNSADELWQWLQNSSLGDLSKIEVLDISWFTECMGAGKPVQVEARHCLVKSCPVIDQYLEPSTVETVSQYACQRRTTMENHNQIFTDAFAILAENAEFNESEGPCLAFRRAASLLKSLPHAISSSKDLEGLPCLGDQTKAVIEDILEYGQCSKVQDVLCDDRYQTIKLFTSVFGVGLKTAEKWYRKGFHSLEEVQADNAIHFTKMQKAGFLYYDDISAAVCKAEADAIGQIVEETVRLIAPDAIVTLTGGFRRGKECGHDVDFLITTPEMGKEVWLLNRLINRLQNQGILLYYDIVESTFDKTRLPCRKFEAMDHFQKCFAIIKLKKELAAGRVQKDWKAIRVDFVVAPVDNFAFALLGWTGSRQFERDLRRWARHERKMLLDNHALYDKTKKIFLPAKTEEDIFAHLGLDYIPPWQRNA

SEQ ID NO: 73 - protein, 494 aa, Artificial Sequence
  Modified TdT Sequences
MLHIPIFPPIKKRQKLPESRNSCKYEVKFSEVAIFLVERKMGSSRRKFLTNLARSKGFRIEDVLSDAVTHVVAEDNSADELWQWLQNSSLGDLSKIEVLDISWFTECMEAGKPVQVEARHCLVKSCPVIDQYLEPSTVETVSQYACQRRTTMENCNQIFTDAFAILAENAEFNESEGPCLAFRRAASLLKSLPHAISSSKDLEGLPCLGDQTKAVIEDILEYGQCSKVQDVLCDDRYQTIKLFTSVFGVGLKTAEKWYRKGFHSLEEVQADKAIHFTKMQKAGFLYYDDISAAVCKAEAQAIGQIVEETVRLIAPDAIVTLTGGFRRGKECGHDVDFLITTPEMGKEVWLLNRLINRLQNQGILLYYDIVESTFDKTRLPCRKFEAMDHFQKCFAIIKLKKELAAGRVQKDWKAIRVDFVACPVDNFAFALLGWTGSRQFERDLRRFARHERKMLLDNHALYDKTKKIFLPAKTEEDIFAHLGLDYIPPWQRNA

SEQ ID NO: 74 - protein, 494 aa, Artificial Sequence
  Modified TdT Sequences
MLHIPIFPPIKKRQKLPESRNSCKYEVKFSEVAIFLVERKMGSSRRKFLTNLARSKGFRIEDVLSDAVTHVVAEQNSADELWQWLQNSSLGDLSKIEVLDISWFTECMEAGKPVQVEARHCLVKSCPVIDQYLEPSTVETVSQYACQRRTTMENHNQIFTDAFAILAENAEFNESEGPCLEFRRAASLLKSLPHAISSSKDLEGLPCLGDQTKAVIEDILEYGQCSKVQDVLCDDRYQTIKLFTSVFGVGLKTAEKWYRKGFHSLEEVQADKAIHFTKMQKAGFLYYDDISAAVCKAEADAIGQIVEETVRLIAPDAIVTLTGGFRRGKECGHDVDFLITTPEMRKEVWLLNRLINRLQNQGILLYYDIVESTFDKTRLPCRKFEAMDHFQKCFAIIKLKKELAAGRVQKDWKAIRVDFVMPPVDNFAFALLGWTGSRQFERDLRRFARHERKMLLDNHALYDKTKKIFLPAKTEEDIFAHLGLDYIPPWQRNA

SEQ ID NO: 75 - protein, 494 aa, Artificial Sequence
  Modified TdT Sequences
MLHIPIFPPIKKRQKLPESRNSCKYEVKFSEVAIFLVERKMGSSRRKFLTNLARSKGFRIEDVLSDAVTHVVAEQNSADELWQWLQNSSLGDLSKIEVLDISWFTECMEAGKPVQVEARHCLVKSCPVIDQYLEPSTVETVSQYACQRRTTMENHNQIFTDAFAILAENAEFNESEGPCLAFRRAASLLKSLPHAISSSKDLEGLPCLGDQTKAVIEDILEYGQCSKVQDVLCDDRYQTIKLFTSVFGVGLKTAEKWYRKGFHSLEEVQADKAIHFTKMQKAGFLYYDDISAAVCKAEADAIGQIVEETVWLIAPDAIVTLTGGFRRGKECGHDVDFLITTPEMGKEVWLLNRLINRLQNQGILLYYDIVESTFDKTRLPCRKFEAMDHFQKCFAIIKLKKELAAGRVQKDWKAIRVDFVACPVDNFAFALLGWTGSRQFERDLRRFARHERKMLLDNHALYDKTKKIFLPAKTEEDIFAHLGLDYIPPWQRNA

SEQ ID NO: 76 - protein, 494 aa, Artificial Sequence
  Modified TdT Sequences
MLHIPIFPPIKKRQKLPESRNSCKYEVKFSEVAIFLVERKMGASRRKFLTNLARSKGFRIEDVLSDAVTHVVAEDNSADELWQWLQNSSLGDLSKIEVLDISWFTECMGAGKPVQVEARHCLVKSCPVIDQYLEPSTVETVSQYACQRRTTMENHNQIFTDAFAILAENAEFNESEGPCLAFRRAASLLKSLPHAISSSKDLEGLPCLGDQTSAVIEDILEYGQCSKVQDVLCDDRYQTIKLFTSVFGVGLKTAEKWYRKGFHSLEEVQADNAIHFTKMQKAGFLYYDDISAAVCKAEADAIGQIVEETVRLIAPDAIVTLTGGFRRGKECGHDVDFLITTPEMGKEVWLLNRLINRLQNQGILLYYDIVESTFDKTRLPCRKFEAMDHFQKCFAIIKLKKELAAGRVQKDWKAIRVDFVAPPVDNFAFALLGWTGSRQFERDLRRFARHERKMILDNHALYDKTKKIFLPAKTEEDIFAHLGLDYIPPWQRNA

SEQ ID NO: 77 - protein, 494 aa, Artificial Sequence
  Modified TdT Sequences
MLHIPIFPPIKKRQKLPESRNSCKYEVKFSEVAIFLVERKMGSSRRKFLTNLARSKGFRIEDVLSDAVTHVVAEDNSADELWQWLQNSSLGDLSKIEVLDISWFTECMEAGKPVQVEARHCLVKSCPVIDQYLEPSTVETVSQYACQRRTTMENHNQIFTDAFAILAENAEFNESEGPCLAFRRAASLLKSLPHAISSSKDLEGLPCLGDQSKAVIEDILEYGQCSKVQDVLCDDRYQTIKLFTSVFGVGLKTAEKWYRKGFHSLEEVQADKAIHFTKMQKAGFLYYDDISAAVCKAEADAIGQIVEETVWLIAPDAIVTLTGGFRRGKECGHDVDFLITTPEMGKEVWLLNRLINRLQNQGILLYYDIVESTFDKTRLPCRKFEAMDHFQKCFAIIKLKKELAAGRVQKDWKAIRVDFVMCPVDNFAFALLGWTGSRQFERDLRRFARHERKMLLDNHALYDKTKKIFLPAKTEEDIFAHLGLDYIPPWQRNA

SEQ ID NO: 78 - protein, 494 aa, Artificial Sequence
  Modified TdT Sequences
MLHIPIFPPIKKRQKLPESRNSCKYEVKFREVAIFLVERKMGSSRRKFLTNLARSKGFRIEDVLSDAVTHVVAEDNSADELWQWLQNSSLGDLSKIEVLDISWFTECMEAGKPVQVEARHCLVKSCPVIDQYLEPSTVETVSQYACQRRTTMENHNQIFTDAFAILAENAEFNESEGPCLAFRRAASLLKSLPHAISSSKDLEGLPCLGDQTKRVIEDILEYGQCSKVQDVLCDDRYQTIKLFTSVFGVGLKTAEKWYRKGFHSLEEVQADNAIHFTKMQKAGFLYYDDISAAVCKAEADAIGQIVEETVRLIAPDAIVTLTGGFRRGKECGHDVDFLITTPEMGKEVWLLNRLINRLQNQGILLYYDIVESTFDKTRLPCRKFEAMDHFQKCFAIIKLKKELAAGRVQKDWKAIRVDFVAPPVDNFAFALLGWTGSRQFERDLRRFARHERKMLLDNHALYDKTKKIFLPAKTEEDIFAHLGLDYIPPWQRNA

SEQ ID NO: 79 - protein, 494 aa, Artificial Sequence
  Modified TdT Sequences
MLHIPIFPPIKKRQKLPESRNSCKYEVKFSEVAIFLVERKMGSSRRKFLTNLARSKGFRIEDVLSDAVTHVVAEDNSADELWQWLQNSSLGDLSKIEVLDISWFTECMGAGKPVQVEARHCLVKSCPVIDQYLEPSTVETVSQYACQRRTTMENHNQIFTDAFAVLAENAEFNESEGPCLAFRRAASLLKSLPHAISSSKDLEGLPCLGDQSKAVIEDILEYGQCSKVQDVLCDDRYQTIKLFTSVFGVGLKTAEKWYRKGFHSLEEVQADNAIHFTKMQKAGFLYYDDISAAVCKAEADAIGQIVEETVRLIAPDAIVTLTGGFRRGKECGHDVDFLITTPEMGKEVWLLNRLINRLQNQGILLYYDIVESTFDKTRLPCRKFEAMDHFQKCFAIIKLKKELAAGRVQKDWKAIRVDFVAPPVDNFAFALLGWTGSRQFERDLRRWARHERKMLLDNHALYDKTKKIFLPAKTEEDIFAHLGLDYIPPWQRNA

SEQ ID NO: 80 - protein, 494 aa, Artificial Sequence
  Modified TdT Sequences
MLHIPIFPPIKKRQKLPESRNSCKYEVKFSEVAIFLVERKMGSSRRKFLTNLARSKGFRIEDVLSDAVTHVVAEDNSADELWQWLQNSSLGDLSKIEVLDISWFTECMGAGKPVQVEARHCLVKSCPVIDQYLEPSTVETVSQYACQRRTTMENHNKIFTDAFAILAENAEFNESEGPCLAFRRAASLLKSLPHAISSSKDLEGLPCLGDQTKAVIEDILEYGQCSKVQDVLCDDRYQTIKLFTSVFGVGLKTAEKWYRKGFHSLEEVQADNAIHFTKMQKAGFLYYDDISAAVCKAEAQAIGQIVEETVRLIAPDAIVTLTGGFRRGKECGHDVDFLITTPEMGKEVWLLNRLINRLQNQGILLYYDIVESTFDKTRLPCRKFEAMDAFQKCFAIIKLKKELAAGRVQKDWKAIRVDFVAPPVDNFAFALLGWTGSRQFERDLRRFARHERKMLLDNHALYDKTKKIFLPAKTEEDIFAHLGLDYIPPWQRNA

SEQ ID NO: 81 - protein, 494 aa, Artificial Sequence
  Modified TdT Sequences
MLHIPIFPPIKKRQKLPESRNSCKYEVKFSEVAIFLVERKMGSSRRKFLTNLARSKGFRIEDVLSDAVTHVVAEDNSADELWQWLQNSSLGDLSKIEVLDISWFTECMEAGKPVQVEARHCLVKSCPVIDQYLEPSTVETVSQYACQRRTTMENHNQIFTDAFAILAENAEFNESEGPCLAFRRAASLLKSLPHAISSSKDLEGLPCLGDQTKAVIEDILEYGQCSKVQDVLCDDRYQTIKLFTSVFGVGLKTAEKWYRKGFHSLEEVQADNAIHFTKMQKAGFLYYDDISAAVCKAEADAIGQIVEEAVRLIAPDAIVTLTGGFRRGKECGHDVDFLITTPEMGKEVWLLNRLINRLQNQGILLYYDIVESTFDKTRLPCRKFEAMDHFQKCFAIIKLKKELAAGRVQKDWKAIRVDFVAPPVDNFAFALLGWTGSRQFERDLRRFARHERKMLLDNHALYDKTKKIFLPAKTEEDIFAHLGLDYIDPWQRNA

SEQ ID NO: 82 - protein, 494 aa, Artificial Sequence
  Modified TdT Sequences
MLHIPIFPPIKKRQKLPESRNSCKYEVKFSEVAIFLVERKMGSTRRKFLTNLARSKGFRIEDVLSDAVTHVVAEQNSADELWQWLQNSSLGDLSKIEVLDISWFTECMEAGKPVQVEARHCLVKSCPVIDQYLEPSTVETVSQYACQRRTTMENHNQIFTDAFAILAENAEFNESEGPCLAFRRAASLLKSLPHAISSSKDLEGLPCLGDQTKAVIEDILEYGQCSKVQDVLCDDRYQTIKLFTSVFGVGLKTAEKWYRKGFHSLEEVQADKAIHFTKMQRAGFLYYDDISAAVCKAEADAIGQIVEETVRLIAPDAIVTLTGGFRRGKECGHDVDFLITTPEMGKEVWLLNRLINRLQNQGILLYYDIVESTFDKTRLPCRKFEAMDHFQKCFAIIKLKKELAAGRVQKDWKAIRVDFVMPPVDNFAFALLGWTGSRQFERDLRRFARHERKMLLDNHALYDKTKKIFLPAKTEEDIFAHLGLDYIPPWQRNA

SEQ ID NO: 83 - protein, 494 aa, Artificial Sequence
  Modified TdT Sequences
MLHIPIFPPIKKRQKLPESRNSCKYEVKFSEVAIFLVERKMGSSRRKFLTNLARSKGFRIEDVLSDAVTHVVAEDNSADELWQWLQNSSLGDLSKIEVLDISWFTECMEAGKPVQVEARHCLVKSCPVIDQYLEPSTVETVSQYACQRRTTMENHNQIFTDAFAILAENAEFNESEGPCLAFRRAASLLKSLPHPISSSKDLEGLPCLGDQTKAVIEDILEYGQCSKVQDVLCDDRYQTIKLFTSVFGVGLKTAEKWYRKGFHSLEEVQADNAIHFTKMQKAGFLYYDDISAAVCKAEADAIGQIVEETVRLIAPDAIVTLTGGFRRGKECGHDVDFLITTPEMGKEVWLLNRLINRLQNQGILLYYDIVESTFDKTRLPCRKFEAMDHFQKCFAIIKLKKELAAGRVQKDWKAIRVDFVAPPVDNFAFALLGWTGSRQFERDLRRFARHERKMILDNHALYDKTKKIFLPAKTEEDIFAHLGLDYIPPWQRNA

SEQ ID NO: 84 - protein, 494 aa, Artificial Sequence
  Modified TdT Sequences
MLHIPIFPPIKKRQKLPESRNSCKYEVKFREVAIFLVERKMGSSRRKFLTNLARSKGFRIEDVLSDAVTHVVAEDNSADELWQWLQNSSLGDLSKIEVLDISWFTECMGAGKPVQVEARHCLVKSCPVIDQYLEPSTVETVSQYACQRRTTMENHNQIFTDAFAILAENAEFNESEGPCLAFMRAASLLKSLPHAISSSKDLEGLPCLGDQTKAVIEDILEYGQCSKVQDVLCDDRYQTIKLFTSVFGVGLKTAEKWYRKGFHSLEEVQADNAIHFTKMQKAGFLYYDDISAAVCKAEADAIGQIVEETVRLIAPDAIVTLTGGFRRGKECGHDVDFLITSPEMGKEVWLLNRLINRLQNQGILLYYDIVESTFDKTRLPCRKFEAMDHFQKCFAIIKLKKELAAGRVQKDWKAIRVDFVAPPVDNFAFALLGWTGSRQFERDLRRFARHERKMLLDNHALYDKTKKIFLPAKTEEDIFAHLGLDYIPPWQRNA

SEQ ID NO: 85 - protein, 494 aa, Artificial Sequence
  Modified TdT Sequences
MLHIPIFPPIKKRQKLPESRNSCKYEVKFSEVAIFLVERKMGSSRRKFLTNLARSKGFRIEDVLSDAVTHVVAEDNSADELWQWLQNSSLGDLSKIEVLDISWFTECMEAGKPVQVEARHCLVKSCPVIDQYLEPSTVETVSQYACQRRTTMENHNQIFTDAFAILAENAEFNESEGPCVAFRRAASLLKSLPHAISSSKDLEGLPCLGDQTKAVIEDILEYGQCSKVQDVLCDDRYQTIKLFTSVFGVGLKTAEKWYRKGFHSLEEVQADNAIHFTKMQKAGFLYYDDISAAVCKAEADAIGQIVEETVRLIAPDAIVTLTGGFRRGKECGHDVDFLITTPEMGKEVWLLNRLINRLQNQGILLYYDIVESTFDKTRLPCRKFEAMDHFQKCFAIIKLKKELAAGRVQKDWKAIRVDFVMCPVDNFAFALLGWTGSRQFERDLRRFARHERKMLLDNHALYDKTKKIFLPAKTEEDIFAHLGLDYIPPWQRNA

SEQ ID NO: 86 - protein, 494 aa, Artificial Sequence
  Modified TdT Sequences
MLHIPIFPPIKKRQKLPESRNSCKYEVKFSEVAIFLVERKMGSSRRKFLTNLARSKGFRIEDVLSDAVTHVVAEDNSADELWQWLQNSSLGDLSKIEVLDISWFTECMGAGKPVQVEARHCLVKSCPVIDQYLEPSTVETVSQYACQRRTTMENHNQIFTDAFAILAENAEFNESEGPCLAFRRAASLLKSLPHAISSSKDLEGLPCLGDQTKAVIEDILEYGQCSKVQDVLCDDRYQTIKLFTSVFGVGLKTAEKWYRKGFHSLEEVQADNAIHFTKMQKAGFLYYDDISAAVCKAEADAIGQIVEETVRLIAPDAIVTLTGGFRRGKECGHDVDFLITTPEMGKEVWLLNRLINRLQNQGILLYCDIVESTFDKTRLPCRKFEAMDHFQKCFAIIKLKKELAAGRVQKDWKAIRVDFVACPYDNFAFALLGWTGSRQFERDLRRFARHERKMLLDNHALYDKTKKIFLPAKTEEDIFAHLGLDYIPPWQRNA

SEQ ID NO: 87 - protein, 494 aa, Artificial Sequence
  Modified TdT Sequences
MLHIPIFPPIKKRQKLPESRNSCKYEVKFSEVAIFLVERKMGSSRRKFLTNLARSKGFRIEDVLSDAVTHVVAEDNSADELWQWLQNSSLGDLSKIEVLDISWFTECMGAGKPVQVEARHCLVKSCPVIDQYLEPSTVETVSQYACQRRTTMENHNQIFTDAFAILAENAEFNESEGPCLAFMRAASLLKSLPHAISSSKDLEGLPCLGDQTKAVIEDILEYGQCSKVQDVLCDDRYQTIKLFTSVFGVGLKTAEKWYRKGFHSLEEVQADNAIHFTKMQKAGFLYYDDISAAVCKAEADAIGQIVEEAVRLIAPDAIVTLTGGFRRGKECGHDVDFLITTPEMGKEVWLLNRLINRLQNQGILLYYDIVESTFDKTRLPCRKFEAMDHFQKCFAIIKLKKELAAGRVQKDWKAIRVDFVVPPVDNFAFALLGWTGSRQFERDLRRFARHERKMLLDNHALYDKTKKIFLPAKTEEDIFAHLGLDYIPPWQRNA

SEQ ID NO: 88 - protein, 494 aa, Artificial Sequence
  Modified TdT Sequences
MLHIPIFPPIKKRQKLPESRNSCKYEVKFSEVAIFLVERKMGSSRRKFLTNLARSKGFRIEDVLSDAVTHVVAEDNSADELWQWLQNSSLGDLSKIEVLDISWFTECMEAGKPVQVEARHCLVKSCPVIDQYLEPSTVETVSQYACQRRTTMENHNQIFTDAFAILAENAEFNESEGPCLAFRRAASLLKSLPHAISSSKDLEGLPCLGDQTKAVIEDILEYGQCSKVQDVLCDDRYQTIKLFTSVFGVGLKTAEKWYRKGFHSLEEVQADNAIHFTKMQKAGFLYYDDISAAVCKAEADAIGQIVEETVRLIAPDAIVTLTGGFRRGKNCGHDVDFLITTPEMGKEVWLLNRLINRLQNQGILLYYDIVESTFDKTRLPCRKFEAMDHFQKCFAIIKLKKELAAGRVQKDWKAIRVDFVLCPVDNFAFALLGWTGSRQFERDLRRFARHERKMLLDNHALYDKTKKIFLPAKTEEDIFAHLGLDYIPPWQRNA

SEQ ID NO: 89 - protein, 494 aa, Artificial Sequence
  Modified TdT Sequences
MLHIPIFPPIKKRQKLPESRNSCKYEVKFSELAIFLVERKMGSSRRKFLTNLARSKGFRIEDVLSDAVTHVVAEDNSADELWQWLQNSSLGDLSKIEVLDISWFTECMEAGKPVQVEARHCLVKSCPVIDQYLEPSTVETVSQYACQRRTTMENHNQIFTDAFAILAENAEFNESEGPCLAFRRAASLLKSLPHAISSSKDLEGLPCLGDQTKAVIEDILEYGQCSKVQDVLCDDRYQTIKLFTSVFGVGLKTAEKWYRKGFHSLEEVQADKAIHFTKMQKAGFLYYDDISAAVCKAEADAIGQIVEETVRLIAPDAIVTLTGGFRRGKECGHDVDFLITTPEMGKEVWLLNRLINRLQNQGILLYYDIVESTFDKTRLPCRKFEAMDHFQKCFAIIKLKKELAAGRVQKDWKAIRVDFVACPVDRFAFALLGWTGSRQFERDLRRFARHERKMLLDNHALYDKTKKIFLPAKTEEDIFAHLGLDYIPPWQRNA

SEQ ID NO: 90 - protein, 494 aa, Artificial Sequence
  Modified TdT Sequences
MLHIPIFPPIKKRQKLPESRNSCKYEVKFSEVAIFLVERKMGSSRRKFLTNLARSKGFRIEDVLSDAVTHVVAEDNSADELWQWLQNSSLGDLSKIEVLDISWFTECMGAGRPVQSEARHCLVKSCPVIDQYLEPSTVETVSQYACQRRTTMENHNQIFTDAFAILAENAEFNESEGPCLAFRRAASLLKSLPHAISSSKDLEGLPCLGDQTKAVIEDILEYGQCSKVQDVLCDDRYQTIKLFTSVFGVGLKTAEKWYRKGFHSLEEVQADNAIHFTKMQKAGFLYYDDISAAVCKAEAQAIGQIVEETVRLIAPDAIVTLTGGFRRGKECGHDVDFLITTPEMGKEVWLLNRLINRLQNQGILLYYDIVESTFDKTRLPCRKFEAMDHFQKCFAIIKLKKELAAGRVQKDWKAIRVDFVAPPVDNFAFALLGWTGSRQFERDLRRFARHERKMLLDNHALYDKTKKIFLPAKTEEDIFAHLGLDYIPPWQRNA

SEQ ID NO: 91 - protein, 494 aa, Artificial Sequence
  Modified TdT Sequences
MLHIPIFPPIKKRQKLPESRNSCKYEVKFSEVAIFLVERKMGSSRRKFLTNLARSKGFRIEDVLSDAVTHVVAEDNSADELWQWLQNSSLGDLSKIEVLDISWFTECMGAGKPVQVEARHCLVKSCPVIDQYLEPSTVETVSQYACQRRTTMEHHNQIFTDAFAILAENAEFNESEGPCLAFRRAASLLKSLPHAISSSKDLEGLPCLGDQTKAVIEDILEYGQCSKVQDVLCDDRYQTIKLFTSVFGVGLKTAEKWYRKGFHTLEEVQADNSIHFTKMQKAGFLYYDDISAAVCKAEADAIGQIVEETVRLIAPDAIVTLTGGFRRGKECGHDVDFLITTPEMGKEVWLLNRLINRLQNQGILLYYDIVESTFDKTRLPCRKFEAMDHFQKCFAIIKLKKELAAGRVQKDWKAIRVDFVAPPVDNFAFALLGWTGSRQFERDLRRFARHERKMLLDNHALYDKTKKIFLPAKTEEDIFAHLGLDYIPPWQRNA

SEQ ID NO: 92 - protein, 494 aa, Artificial Sequence
  Modified TdT Sequences
MLHIPIFPPIKKRQKLPESRNSCKYEVKFSEVAIFLVERKMGSSRRKFLTNLARSKGFRIEDVLSDAVTHVVAEDNSADELWQWLQNSSLGDLSKIEVLDISWFTECMGAGRPVQVEARHCLVKSCPVIDQYLEPSTVETVSQYACQRRTTMENHNQIFTDAFAILAENAEFNESEGPCLAFRRAASLLKSLPHAISSSKDLEGLPCLGDQTKAVIEDILEYGQCSKVQDVLCDDRYQTIKLFTSVFGVGLKTAEKWYRKGLHSLEEVQADNAIHFTKMQKAGFLYYDDISAAVCKAEADAIGQIVEETVRLIAPDAIVTLTGGFRRGKECGHDVDFLITTPEMGKEVWLLNRLINRLQNQGILLYYDIVESTFDKTRLPCRKFEAMDHFQKCFAIIKLKKELAAGRVQKDWKAIRVDFVAAPVDNFAFALLGWTGSRQFERDLRRFARHERKMLLDNHALYDKTKKIFLPAKTEEDIFAHLGLDYIPPWQRNA

SEQ ID NO: 93 - protein, 494 aa, Artificial Sequence
  Modified TdT Sequences
MLHIPIFPPIKKRQKLPESRNSCKYEVKFSEVAIFLVERKMGSSRRKFLTNLARSKGFRIEDVLSDAVTHVVAEDNSADELWQWLQNSSLGDLSKIEVLDISWFTECMGAGKPVQVEARHCLVKSCPVIDQYLEPSTVETVSQYACQRRTTMENHNKIFTDAFAILAENAEFNESEGPCLAFRRAASLLKSLPHAISSSKDLEGLPCLGDQTKAVIEDILEYGQCSKVQDVLCDDRYQTIKLFTSVFGVGLKTAEKWYRKGFHSLEEVQADNAIHFTKMQKAGFLYYDDISAAVCKAEADAIGQIVEETVRLIAPDAIVTLTGGFRRGKECGHDVDFLITTPEMGKEVWLLNRLINRLQNQGILLYYDIVESTFDKTRLPCRKFEAMDHFQKCFAIIKLKKELAAGRVQKDWKAIRVDFVVPPVDNFAFALLGWTGSRQFERDLRRFARHEKKMLLDNHALYDKTKKIFLPAKTEEDIFAHLGLDYIPPWQRNA

SEQ ID NO: 94 - protein, 494 aa, Artificial Sequence
  Modified TdT Sequences
MLHIPIFPPIKKRQKLPESRNSCKYEVKFSEVAIFLVERKMGSSRRKFLTNLARSKGFRIEDVLSDAVTHVVAEDNSADELWQWLQNSSLGDLSKIEVLDISWFTECMEAGKPVQVEARHCLVKSCPVIDQYLEPSTVETVSQYACQRRTTMENHNQMFTDAFAILAENAEFNESEGPCLAFRRAASLLKSLPHAISSSKDLEGLPCLGDQTKAVIEDILEYGQCSKVQDVLCDDRYQTIKLFTSVFGVGLKTAEKWYRKGFHSLEEVQADKAIHFTKMQKAGFLYYDDISAAVCKAEADAIGQIVEETVRLIAPDAIVTLTGGFRRGKECGHDVDFLITTPEMRKEVWLLNRLINRLQNQGILLYYDIVESTFDKTRLPCRKFEAMDHFQKCFAIIKLKKELAAGRVQKDWKAIRVDFVLCPVDNFAFALLGWTGSRQFERDLRRFARHERKMLLDNHALYDKTKKIFLPAKTEEDIFAHLGLDYIPPWQRNA

SEQ ID NO: 95 - protein, 494 aa, Artificial Sequence
  Modified TdT Sequences
MLHIPIFPPIKKRQKLPESRNSCKYEVKFREVAIFLVERKMGSSRRKFLTNLARSKGFRIEDVLSDAVTHVVAENNSADELWQWLQNSSLGDLSKIEVLDISWFTECMGAGKPVQVEARHCLVKSCPVIDQYLEPSTVETVSQYACQRRTTMENHNQIFTDAFAILAENAEFNESEGPCLAFRRAASLLKSLPHAISSSKDLEGLPCLGDQTKAVIEDILEYGQCSKVQDVLCDDRYQTIKLFTSVFGVGLKTAEKWYRKGFHTLEEVQADNAIHFTKMQKAGFLYYDDISAAVCKAEADAIGQIVEETVRLIAPDAIVTLTGGFRRGKECGHDVDFLITTPEMGKEVWLLNRLINRLQNQGILLYYDIVESTFDKTRLPCRKFEAMDHFQKCFAIIKLKKELAAGRVQKDWKAIRVDFVAPPVDNFAFALLGWTGSRQFERDLRRFARHERKMLLDNHALYDKTKKIFLPAKTEEDIFAHLGLDYIDPWQRNA

SEQ ID NO: 96 - protein, 494 aa, Artificial Sequence
  Modified TdT Sequences
MLHIPIFPPIKKRQKLPESRNSCKYEVKFSEVAIFLVERKMGSSRRKFLTNLARSKGFRIEDVLSDAVTHVVAENNSADELWQWLQNSSLGDLSKIEVLDISWFTECMGAGKPVQVEARHCLVKSCPVIDQYLEPSTVETVSQYACQRRTTMENHNQIFTDAFAILAENAEFNESEGPCLAFRRAASLLKSLPHAISSSKDLEGLPCLGDQSKAVIEDILEYGQCSKVQDVLCDDRYQTIKLFTSVFGVGLKTAEKWYRKGFHSLEEVQADKAIHFTKMQKAGFLYYDDISAAVCKAEADAIGQIVEETVRLIAPDAIVTLTGGFRRGKECGHDVDFLITTPEMGKEVWLLNRLINRLQNQGILLYYDIVESTFDKTRLPCRKFEAMDHFQKCFAIIKLKKELAAGRVQKDWKAIRVDFVAPPVDNFAFALLGWTGSRQFERDLRRFARHERKMLLDNHALYDKTKKIFLPAKTEEDIFAHLGLDYIPPWQRNA

SEQ ID NO: 97 - protein, 494 aa, Artificial Sequence
  Modified TdT Sequences
MLHIPIFPPIKKRQKLPESRNSCKYEVKFSEVAIFLVERKMGSSRRKFLTNLARSKGFRIEDVLSDAVTHVVAEDNSADELWQWLQNSSLGDLSKIEVLDISWFTECMEAGKPVQVEARHCLVKSCPVIDQYLEPSTVETVSQYACQRRTTMENHNQIFTDAFAILAENAEFNESEGPCLAFRRAASLLKSLPHAISSSKDLEGLPCLGDQTKAVIEDILEYGQCSKVQDVLCDDRYQTIKLFTSVFGVGLKTAEKWYRKGFHSLEEVQADKAIHFTKMQKAGFLYYDDISAAVCKAEAQAIGQIVEETVWLIAPDAIVTLTGGFRRGKECGHDVDFLITTPEMGKEVWLLNRLINRLQNQGILLYYDIVESTFDKTRLPCRKFEAMDHFQKCFAIIKLKKELAAGRVQKDWKAIRVDFVMPPVDNFAFALLGWTGSKQFERDLRRFARHERKMLLDNHALYDKTKKIFLPAKTEEDIFAHLGLDYIPPWQRNA

SEQ ID NO: 98 - protein, 494 aa, Artificial Sequence
  Modified TdT Sequences
MLHIPIFPPIKKRQKLPESRNSCKYEVKFSEVAIFLVERKMGSSRRKFLTNLARSKGFRIEDVLSDAVTHVVAENNSADELWQWLQNSSLGDLSKIEVLDISWFTECMGAGKPVQVEARHCLVKSCPVIDQYLEPSTVETVSQYACQRRTTMENHNQIFTDAFAILAENAEFNESEGPCLAFMRAASLLKSLPHAISSSKDLEGLPCLGDQTKAVIEDILEYGQCSKVQDVLCDDRYQTIKLFTSVFGVGLKTAEKWYRKGFHSLEEVQADNAIHFTKMQKAGFLYYDDINAAVCKAEADAIGQIVEETVRLIAPDAIVTLTGGFRRGKECGHDVDFLITTPEMGKEVWLLNRLINRLQNQGILLYYDIVESTFDKTRLPCRKFEAMDHFQKCFAIIKLKKELAAGRVQKDWKAIRVDFVAPPVDNFAFALLGWTGSRQFERDLRRFARHERKMLLDNHALYDKTKKIFLPAKTEEDIFAHLGLDYIPPWQRNA

SEQ ID NO: 99 - protein, 494 aa, Artificial Sequence
  Modified TdT Sequences
MLHIPIFPPIKKRQKLPESRNSCKYEVKFSEVAIFLVERKMGSSRRKFLTNLARSKGFRIEDVLSDAVTHVVAEDNSADELWQWLQNSSLGDLSKIEVLDISWFTECMGAGKPVEVEARHCLVKSCPVIDQYLEPSTVETVSQYACQRRTTMENHNQIFTDAFAILAENAEFNESEGPCLAFRRAASLLKSLPHAISSSKDLEGLPCLGDQTKAVIEDILEYGQCSKVQDVLCDDRYQTIKLFTSVFGVGLKTAEKWYRKGLHSLEEVQADNAIHFTKMQKAGFLYYDDISAAVCKAEADAIGQIVEETVRLIAPDAIVTLTGGFRRGKECGHDVDFLITTPEMGKEVWLLNRLINRLQNQGILLYYDIVESTFDKTRLPCRKFEAMDHFQKCFAIIKLKKELAAGRVQKDWKAIRVDFVMPPVDNFAFALLGWTGSRQFERDLRRFARHERKMLLDNHALYDKTKKIFLPAKTEEDIFAHLGLDYIPPWQRNA

SEQ ID NO: 100 - protein, 494 aa, Artificial Sequence
  Modified TdT Sequences
MLHIPIFPPIKKRQKLPESRNSCKYEVKFSEVAIFLVERKMGSSRRKFLTNLARSKGFRIEDVLSDAVTHVVAEDNSADELWQWLQNSSLGDLSKIEVLDISWFTECMEAGKPVQVEARHCLVKSCPVIDQYLEPSTVETVSQYACQRRTTMENHNQIFTDAFAILAENAEFNESEGPCLAFRRAASLLKSLPHAISSSKDLEGLPCLGDQTKAVIEDILEYGQCSKVQDVLCDDRYQTIKLFTSVFGVGLKTAEKWYRKGFHSLEEVQADKAIHFTKMQRAGFLYYDDISAAVCRAEAQAIGQIVEETVRLIAPDAIVTLTGGFRRGKECGHDVDFLITTPEMGKEVWLLNRLINRLQNQGILLYYDIVESTFDKTRLPCRKFEAMDHFQKCFAIIKLKKELAAGRVQKDWKAIRVDFVMPPVDNFAFALLGWTGSRQFERDLRRFARHERKMLLDNHALYDKTKKIFLPAKTEEDIFAHLGLDYIPPWQRNA

SEQ ID NO: 101 - protein, 494 aa, Artificial Sequence
  Modified TdT Sequences
MLHIPIFPPIKKRQKLPESRNSCKYEVKFSEVAIFLVERKMGSTRRKFLTNLARSKGFRIEDVLSDAVTHVVAEDNSADELWQWLQNSSLGDLSKIEVLDISWFTECMEAGKPVQVEARHCLVKSCPVIDQYLEPSTVETVSQYACQRRTTMENHNQIFTDAFAILAENAEFNESEGPCLAFRRAASLLKSLPHAISSSKDLEGLPCLGDQTKAVIEDILEYGQCSKVQDVLCDDRYQTIKLFTSVFGVGLKTAEKWYRKGFHSLEEVQADKAIHFTKMQKAGFLYYDDISAAVCKAEADAIGQIVEETVRLIAPDAIVTLTGGFRRGKECGHDVDFLITTPEMGKEVWLLQRLINRLQNQGILLYYDIVESTFDKTRLPCRKFEAMDHFQKCFAIIKLKKELAAGRVQKDWKAIRVDFVACPVDNFAFALLGWTGSRQFERDLRRFARHERKMLLDNHALYDKTKKIFLPAKTEEDIFAHLGLDYIPPWQRNA

SEQ ID NO: 102 - protein, 494 aa, Artificial Sequence
  Modified TdT Sequences
MLHIPIFPPIKKRQKLPESRNSCKYEVKFSEVAIFLVERKMGSSRRKFLTNLARSKGFRIENVLSDAVTHVVAEQNSADELWQWLQNSSLGDLSKIEVLDISWFTECMEAGKPVQVEARHCLVKSCPVIDQYLEPSTVETVSQYACQRRTTMENHNQMFTDAFAILAENAEFNESEGPCLAFRRAASLLKSLPHAISSSKDLEGLPCLGDQTKAVIEDILEYGQCSKVQDVLCDDRYQTIKLFTSVFGVGLKTAEKWYRKGFHSLEEVQADKAIHFTKMQKAGFLYYDDISAAVCKAEADAIGQIVEETVRLIAPDAIVTLTGGFRRGKECGHDVDFLITTPEMGKEVWLLNRLINRLQNQGILLYYDIVESTFDKTRLPCRKFEAMDHFQKCFAIIKLKKELAAGRVQKDWKAIRVDFVMPPVDNFAFALLGWTGSRQFERDLRRFARHERKMLLDNHALYDKTKKIFLPAKTEEDIFAHLGLDYIPPWQRNA

SEQ ID NO: 103 - protein, 494 aa, Artificial Sequence
  Modified TdT Sequences
MLHIPIFPPIKKRQKLPESRNSCKYEVKFSEVAIFLVERKMGSSRRKFLTNLARSKGFRIEDVLSDAVTHVVAEDNSADELWQWLQNSSLGDLSKIEVLDISWFTECMGAGKPVQVEARHCLVKSCPVIDQYLEPSTVETVSQYACQRRTTMENHNQIFTDAFAILAENAEFNESEGPCLAFRRAASLLKSLPHAISSSKDLEGLPCLGDQTKAVIEDILEYGQCSKVQDVLCDDRYQTIKLFTSVFGVGLKTAEKWYRKGFHSLEEVQADKAIHFTKMQKAGFLYYDDISAAVCKAEAQAIGQIVEETVRLIAPDAIVTLTGGFRRGKECGHDVDFLITTPEMGKEVWLLNRLINRLQNQGILLYYDIVESTFDKTRLPCRKFEAMDHFQKCFAIIKLKKELAAGRVQKDWKAIRVDFVACPVDNFAFALLGWTGSRQFERDLRRFARHERKMLLDNHALYDKTKKIFLPAKTEEDIFAHLGLDYIPPWQRNA

SEQ ID NO: 104 - protein, 494 aa, Artificial Sequence
  Modified TdT Sequences
MLHIPIFPPIKKRQKLPESRNSCKYEVKFSEVAIFLVERKMGSSRRKFLTNLARSKGFRIEDVLSDAVTHVVAEDNSADELWQWLQNSSLGDLSKIEVLDISWFTECMGAGKPVQVEARHCLVKSCPVIDQYLEPSTVETVSQYACQRRTTMENHNQIFTDAFAVLAENAEFNESEGPCLAFRRAASLLKSLPHAISSSKDLEGLPCLGDQTKAVIEDILEYGQCSKVQDVLCDDRYQTIKLFTSVFGVGLKTAEKWYRKGFHSLEEVKADNTIHFTKMQKAGFLYYDDISAAVCKAEADAIGQIVEETVRLIAPDAIVTLTGGFRRGKECGHDVDFLITTPEMGKEVWLLNRLINRLQNQGILLYYDIVESTFDKTRLPCRKFEAMDHFQKCFAIIKLKKELAAGRVQKDWKAIRVDFVAPPVDNFAFALLGWTGSRQFERDLRRFARHERKMLLDNHALYDKTKKIFLPAKTEEDIFAHLGLDYIPPWQRNA

SEQ ID NO: 105 - protein, 494 aa, Artificial Sequence
  Modified TdT Sequences
MLHIPIFPPIKKRQKLPESRNSCKYEVKFSEVAIFLVERKMGSSRRKFLTNLARSKGFRIEDVLSDAVTHVVAEDNSADELWQWLQNSSLGDLSKIEVLDISWFTECMGAGKPVQVEARHCLVKSCPVIDQYLEPSTVETVSQYACQRRTTMENHNQIFTDAFAILAENAEFNESEGPCLAFRRAASLLKSLPHAISSSKDLEGLPCLGDQTKAVIEDILEYGQCSKVQDVLCDDRYQSIKLFTSVFGVGLKTAEKWYRKGLHSLEEVQADNAIHFTKMQKAGFLYYDDINAAVCKAEADAIGQIVEETVRLIAPDAIVTLTGGFRRGKECGHDVDFLITTPEMGKEVWLLNRLINRLQNQGILLYCDIVESTFDKTRLPCRKFEAMDHFQKCFAIIKLKKELAAGRVQKDWKAIRVDFVAPPVDNFAFALLGWTGSRQFERDLRRFARHERKMLLDNHALYDKTKKIFLPAKTEEDIFAHLGLDYIPPWQRNA

SEQ ID NO: 106 - protein, 494 aa, Artificial Sequence
  Modified TdT Sequences
MLHIPIFPPIKKRQKLPESRNSCKYEVKFSEVAIFLVERKMGSSRRKFLTNLARSKGFRIEDVLSDAVTHVVAEQNSADELWQWLQNSSLGDLSKIEVLDISWFTECMGAGKPVQVEARHCLVKSCPVIDQYLEPSTVETVSQYACQRRTTMENHNQIFTDAFAILAENAEFNESEGPCLAFRRAASLLKSLPHAISSSKDLEGLPCLGDQTKAVIEDILEYGQCSKVQDVLCDDRYQTIKLFTSVFGVGLKTAEKWYRKGFHSLEEVQADNAIHFTKMQKAGFLYYDDISAAVCKAEADAIGQIVEETVRLIAPDAIVTLTGGFRRGKECGHDVDFLITTPEMGKEVWLLNRLINRLQNQGILLYYDIVESTFDKTRLPCRKFEAMDAFQKCFAIIKLKKELAAGRVQKDWKAIRVDFVAPPYDNFAFALLGWTGSRQFERDLRRFARHERKMLLDNHALYDKTKKIFLPAKTEEDIFAHLGLDYIPPWQRNA

SEQ ID NO: 107 - protein, 494 aa, Artificial Sequence
  Modified TdT Sequences
MLHIPIFPPIKKRQKLPESRNSCKYEVKFSEIAIFLVERKMGSSRRKFLTNLARSKGFRIEDVLSDAVTHVVAEDNSADELWQWLQNSSLGDLSKIEVLDISWFTECMEAGKPVQIEARHCLVKSCPVIDQYLEPSTVETVSQYACQRRTTMENHNQIFTDAFAILAENAEFNESEGPCLAFRRAASLLKSLPHAISSSKDLEGLPCLGDQTKAVIEDILEYGQCSKVQDVLCDDRYQTIKLFTSVFGVGLKTAEKWYRKGFHSLEEVQADKAIHFTKMQKAGFLYYDDISAAVCKAEADAIGQIVEETVRLIAPDAIVTLTGGFRRGKECGHDVDFLITTPEMGKEVWLLNRLINRLQNQGILLYYDIVESTFDKTRLPCRKFEAMDHFQKCFAIIKLKKELAAGRVQKDWKAIRVDFVMAPVDNFAFALLGWTGSRQFERDLRRFARHERKMLLDNHALYDKTKKIFLPAKTEEDIFAHLGLDYIPPWQRNA

SEQ ID NO: 108 - protein, 494 aa, Artificial Sequence
  Modified TdT Sequences
MLHIPIFPPIKKRQKLPESRNSCKYEVKFSEVAIFLVERKMGSTRRKFLTNLARSKGFRIEDVLSDAVTHVVAEDNSADELWQWLQNSSLGDLSKIEVLDISWFTECMEAGKPVQVEARHCLVKSCPVIDQYLEPSTVETVSQYACQRRTTMENHNQIFTDAFAILAENAEFNESEGPCLAFRRAASLLKSLPHAISSSKDLEGLPCLGDQTKAVIEDILEYGQCSKVQDVLCDDRYQTIKLFTSVFGVGLKTAEKWYRKGFHSLEEVQADKAIHFTKMQKAGFLYYDDISAAVCKAEADAIGQIVEETVRLIAPDAIVTLTGGFRRGKECGHDVDFLITTPEMGKEVWLLNRLINRLQNQGLLLYYDIVESTFDKTRLPCRKFEAMDHFQKCFAIIKLKKELAAGRVQKDWKAIRVDFVMPPVDRFAFALLGWTGSRQFERDLRRFARHERKMLLDNHALYDKTKKIFLPAKTEEDIFAHLGLDYIPPWQRNA

SEQ ID NO: 109 - protein, 494 aa, Artificial Sequence
  Modified TdT Sequences
MLHIPIFPPIKKRQKLPESRNSCKYEVKFSEVAIFLVERKMGSSRRKFLTNLARSKGFRIEDVLSDAVTHVVAENNSADELWQWLQNSSLGDLSKIEVLDISWFTECMGAGKPVQSEARHCLVKSCPVIDQYLEPSTVETVSQYACQRRTTMENHNQIFTDAFAILAENAEFNESEGPCLAFRRAASLLKSLPHAISSSKDLEGLPCLGDQTKAVIQDILEYGQCSKVQDVLCDDRYQTIKLFTSVFGVGLKTAEKWYRKGFHSLEEVQADNAIHFTKMQKAGFLYYDDISAAVCKAEADAIGQIVEETVRLIAPDAIVTLTGGFRRGKECGHDVDFLITTPEMGKEVWLLNRLINRLQNQGILLYYDIVESTFDKTRLPCRKFEAMDHFQKCFAIIKLKKELAAGRVQKDWKAIRVDFVAPPVDNFAFALLGWTGSRQFERDLRRFARHERKMLLDNHALYDKTKKIFLPAKTEEDIFAHLGLDYIPPWQRNA

SEQ ID NO: 110 - protein, 494 aa, Artificial Sequence
  Modified TdT Sequences
MLHIPIFPPIKKRQKLPESRNSCKYEVKFSEVAIFLVERKMGSSRRKFLTNLARSKGFRIEDVLSDAVTHVVAEDNSADELWQWLQNSSLGDLSKIEVLDVSWFTECMEAGKPVQIEARHCLVKSCPVIDQYLEPSTVETVSQYACQRRTTMENHNQIFTDAFAILAENAEFNESEGPCLAFRRAASLLKSLPHAISSSKDLEGLPCLGDQTKAVIEDILEYGQCSKVQDVLCDDRYQTIKLFTSVFGVGLKTAEKWYRKGFHSLEEVQADKAIHFTKMQKAGFLYYDDISAAVCKAEAQAIGQIVEETVRLIAPDAIVTLTGGFRRGKECGHDVDFLITTPEMGKEVWLLNRLINRLQNQGILLYYDIVESTFDKTRLPCRKFEAMDHFQKCFAIIKLKKELAAGRVQKDWKAIRVDFVMPPVDNFAFALLGWTGSRQFERDLRRFARHERKMLLDNHALYDKTKKIFLPAKTEEDIFAHLGLDYIPPWQRNA

SEQ ID NO: 111 - protein, 494 aa, Artificial Sequence
  Modified TdT Sequences
MLHIPIFPPIKKRQKLPESRNSCKYEVKFSEVAIFLVERKMGSSRRKFLTNLARSKGFRIEDVLSDAVTHVVAEDNSADELWQWLQNSSLGDLSKIEVLDISWFTECMGAGKPVQSEARHCLVKSCPVIDQYLEPSTVETVSQYACQRRTTMENHNQIFTDAFAILAENAEFNESEGPCLAFRRAASLLKSLPHAISSSKDLEGLPCLGDQTKAVIEDILEYGQCSKVQDVLCDDRYQTIKLFTSVFGVGLKTAEKWYRKGLHSLEEVQADNAIHFTKMQKAGFLYYDDISAAVCKAEADAIGQIVEETVRLIAPDAIVTLTGGFRRGKECGHDVDFLITSPEMGKEVWLLNRLINRLQNQGILLYYDIVESTFDKTRLPCRKFEAMDAFQKCFAIIKLKKELAAGRVQKDWKAIRVDFVAPPVDNFAFALLGWTGSRQFERDLRRFARHERKMLLDNHALYDKTKKIFLPAKTEEDIFAHLGLDYIPPWQRNA

SEQ ID NO: 112 - protein, 494 aa, Artificial Sequence
  Modified TdT Sequences
MLHIPIFPPIKKRQKLPESRNSCKYEVKFSEVAIFLVERKMGSSRRKFLTNLARSKGFRIEDVLSDAVTHVVAEDNSADELWQWLQNSSLGDLSKIEVLDISWFTECMEAGKPVQVEARHCLVKSCPVIDQYLEPSTVETVSQYACQRRTTMENHNQIFTDAFAILAENAEFNESEGPCLAFRRAASLLKSLPHAISSSKDLEGLPCLGDQTKAVIEDILEYGQCSKVQDVLCDDRYQTIKLFTSVFGVGLKTAEKWYRKGFHSLEEVQADKAIHFTKMQKAGFLYYDDISAAVCKAEADAIGQIVEETVRLIAPDAIVTLTGGFRRGKECGHDVDFLITTPEMGKEVWLLNRLINRLQKQGILLYYDIVESTFDKTRLPCRKFEAMDHFQKCFAIIKLKKELAARRVQKDWKAIRVDFVACPVDNFAFALLGWTGSRQFERDLRRFARHERKMLLDNHALYDKTKKIFLPAKTEEDIFAHLGLDYIPPWQRNA

SEQ ID NO: 113 - protein, 494 aa, Artificial Sequence
  Modified TdT Sequences
MLHIPIFPPIKKRQKLPESRNSCKYEVKFSEVAIFLVERKMGSSRRKFLTNLARSKGFRIEDVLSDAVTHVVAEDNSADELWQWLQNSSLGDLSKIEVLDISWFTECMGAGKPVEVEARHCLVKSCPVIDQYLEPSTVETVSQYACQRRTTMENHNQIFTDAFAILAENAEFNESEGPCLAFRRAASLLKSLPHAISSSKDLEGLPCLGDQSKAVIEDILEYGQCSKVQDVLCDDRYQTIKLFTSVFGVGLKTAEKWYRKGFHSLEEVQADNAIHFTKMQKAGFLYYDDISAAVCKAEADAIGQIVEETVRLIAPDAIVTLTGGFRRGKECGHDVDFLITTPEMGKEVWLLNRLINRLQNQGILLYCDIVESTFDKTRLPCRKFEAMDHFQKCFAIIKLKKELAAGRVQKDWKAIRVDFVAPPVDNFAFALLGWTGSRQFERDLRRFARHERKMLLDNHALYDKTKKIFLPAKTEEDIFAHLGLDYIPPWQRNA

SEQ ID NO: 114 - protein, 494 aa, Artificial Sequence
  Modified TdT Sequences
MLHIPIFPPIKKRQKLPESRNSCKYEVKFSEVAIFLVERKMGSSRRKFLTNLARSKGFRIEDVLSDAVTHVVAEQNSADELWQWLQNSSLGDLSKIEVLDISWFTECMEAGKPVQVEARHCLVKSCPVIDQYLEPSTVETVSQYACQRRTTMENHNQIFTDAFAILAENAEFNESEGPCLAFRRAASLLKSLPHAISSSKDLEGLPCLGDQSKAVIEDILEYGQCSKVQDVLCDDRYQTIKLFTSVFGVGLKTAEKWYRKGFHSLEEVQADKAIHFTKMQKAGFLYYDDISAAVCRAEADAIGQIVEETVRLIAPDAIVTLTGGFRRGKECGHDVDFLITTPEMGKEVWLLNRLINRLQNQGILLYYDIVESTFDKTRLPCRKFEAMDHFQKCFAIIKLKKELAAGRVQKDWKAIRVDFVMPPVDNFAFALLGWTGSRQFERDLRRFARHERKMLLDNHALYDKTKKIFLPAKTEEDIFAHLGLDYIPPWQRNA

SEQ ID NO: 115 - protein, 494 aa, Artificial Sequence
  Modified TdT Sequences
MLHIPIFPPIKKRQKLPESRNSCKYEVKFREVAIFLVERKMGSSRRKFLTNLARSKGFRIEDVLSDAVTHVVAEDNSADELWQWLQNSSLGDLSKIEVLDISWFTECMGAGKPVQVEARHCLVKSCPVIDQYLEPSTVETVSQYACQRRTTMENHNKIFTDAFAILAENAEFNESEGPCLAFRRAASLLKSLPHAISSSKDLEGLPCLGDQTKAVIEDILEYGQCSKVQDVLCDDRYQTIKLFTSVFGVGLKTAEKWYRKGFHSLEEVQADKAIHFTKMQKAGFLYYDDISAAVCKAEADAIGQIVEETVRLIAPDAIVTLTGGFRRGKECGHDVDFLITTPEMGKEVWLLNRLINRLQNQGILLYYDIVESTFDKTRLPCRKFEAMDHFQKCFAIIKLKKELAAGRVQKDWKAIRVDFVAPPVDNFAFALLGWTGSRQFERDLRRFARHERKMLLDNHALYDKTKKIFLPAKTEEDIFAHLGLDYIPPWQRNA

SEQ ID NO: 116 - protein, 494 aa, Artificial Sequence
  Modified TdT Sequences
MLHIPIFPPIKKRQKLPESRNSCKYEVKFSEVAIFLVERKMGSSRRKFLTNLARSKGFRIEDVLSDAVTHVVAEDNSADELWQWLQNSSLGDLSKIEVLDISWFTECMEAGKPVQVEARHCLVKSCPVIDQYLEPSTVETVSQYACQRRTTMENHNQIFTDAFAILAENAEFNESEGPCLAFRRAASLLKSLPHAISSSKDLEGLPCLGDQTKAVIEDILEYGQCSKVQDVLCDDRYQTIKLFTSVFGVGLKTAEKWYRKGFHSLEEVQADKAIHFTKMQKAGFLYYDDISAAVCKAEADAIGQIVEETVRLIAPDAIVTLTGGFRRGKECGHDVDFLITTPEMGKEVWLLNRLINRLQNQGLLLYYDIVESTFDKTRLPCRKFEAMDHFQKCFAIIKLKKERAAGRVQKDWKAIRVDFVMCPVDNFAFALLGWTGSRQFERDLRRFARHERKMLLDNHALYDKTKKIFLPAKTEEDIFAHLGLDYIPPWQRNA

SEQ ID NO: 117 - protein, 494 aa, Artificial Sequence
  Modified TdT Sequences
MLHIPIFPPIKKRQKLPESRNSCKYEVKFSEVAIFLVERKMGSSRRKFLTNLARSKGFRIEDVLSDAVTHVVAEDNSADELWQWLQNSSLGDLSKIEVLDISWFTECMRAGKPVQVEARHCLVKSCPVIDQYLEPSTVETVSQYACQRRTTMENHNQIFTDAFAILAENAEFNESEGPCLAFRRAASLLKSLPHAISSSKDLEGLPCLGDQTKAVIEDILEYGQCSKVQDVLCDDRYQTIKLFTSVFGVGLKTAEKWYRKGFHSLEEVQADKAIHFTKMQKAGFLYYDDISAAVCKAEADAIGQIVEETVWLIAPDAIVTLTGGFRRGKECGHDVDFLITTPEMGKEVWLLNRLINRLQNQGILLYYDIVESTFDKTRLPCRKFEAMDHFQKCFAIIKLKKELAARRVQKDWKAIRVDFVMPPVDNFAFALLGWTGSRQFERDLRRFARHERKMLLDNHALYDKTKKIFLPAKTEEDIFAHLGLDYIPPWQRNA

SEQ ID NO: 118 - protein, 494 aa, Artificial Sequence
  Modified TdT Sequences
MLHIPIFPPIKKRQKLPESRNSCKYEVKFSEVAIFLVERKMGSSRRKFLTNLARSKGFRIEDVLSDAVTHVVAEDNSADELWQWLQNSSLGDLSKIEVLDISWFTECMGAGRPVQVEARHCLVKSCPVIDQYLEPSTVETVSQYACQRRTTMEHHNQIFTDAFAILAENAEFNESEGPCLAFRRAASLLKSLPHAISSSKDLEGLPCLGDQTKAVIEDILEYGQCSKVQDVLCDDRYQTIKLFTSVFGVGLKTAEKWYRKGFHSLEEVQADNAIHFTKMQKAGFLYYDDISAAVCKAEADAIGQIVEETVRLIAPDAIVTLTGGFRRGKECGHDVDFLITTPEMGKEVWLLNRLINRLQNQGILLYYDIVESTFDKTRLPCRKFEAMDHFQKCFAIIKLKKELAAGRVQKDWKAIRVDFVAPPYDNFAFALLGWTGSRQFERDLRRFARHERKMLLDNHALYDKTKKIFLPAKTEEDIFAHLGLDYIPPWQRNA

SEQ ID NO: 119 - protein, 494 aa, Artificial Sequence
  Modified TdT Sequences
MLHIPIFPPIKKRQKLPESRNSCKYEVKFSEVAIFLVERKMGSSRRKFLTNLARSKGFRIEDVLSDAVTHVVAEQNSADELWQWLQNSSLGDLSKIEVLDISWFTECMGAGKPVQIEARHCLVKSCPVIDQYLEPSTVETVSQYACQRRTTMENHNKIFTDAFAILAENAEFNESEGPCLAFRRAASLLKSLPHAISSSKDLEGLPCLGDQTKAVIEDILEYGQCSKVQDVLCDDRYQTIKLFTSVFGVGLKTAEKWYRKGFHSLEEVQADNAIHFTKMQKAGFLYYDDISAAVCKAEADAIGQIVEETVRLIAPDAIVTLTGGFRRGKECGHDVDFLITTPEMGKEVWLLNRLINRLQNQGILLYYDIVESTFDKTRLPCRKFEAMDHFQKCFAIIKLKKELAAGRVQKDWKAIRVDFVAPPVDNFAFALLGWTGSRQFERDLRRFARHERKMLLDNHALYDKTKKIFLPAKTEEDIFAHLGLDYIPPWQRNA

SEQ ID NO: 120 - protein, 494 aa, Artificial Sequence
  Modified TdT Sequences
MLHIPIFPPIKKRQKLPESRNSCKYEVKFSEVAIFLVERKMGSSRRKFLTNLARSKGFRIEDVLSDAVTHVVAEQNSADELWQWLQNSSLGDLSKIEVLDISWFTECMEAGKPVQVEARHCLVKSCPVIDQYLEPSTVETVSQYACQRRTTMENHNQIFTDAFAILAENAEFNESEGPCLAFRRAASLLKSLPHAISSSKDLEGLPCLGDQTKAVIEDILEYGQCSKVQDVLCDDRYQTIKLFTSVFGVGLKTAEKWYRKGFHSLEEVQADKAIHFTKMQKAGFLYYDDISAAVCKAEADAIGQIVEETVRLIAPDAIVTLTGGFRRGKECGHDVDFLITTPEMGKEVWLLNRLINRLQKQGILLYYDIVESTFDKTRLPCRKFEAMDHFQKCFAIIKLKKELAAGRVQKDWKAIRVDFVACPVDNFAFALLGWTGSRQFERDLRRFARHERKMLLDNHALYDKTKKIFLPAKTEEDIFAHLGLDYIPPWQRNA

SEQ ID NO: 121 - protein, 494 aa, Artificial Sequence
  Modified TdT Sequences
MLHIPIFPPIKKRQKLPESRNSCKYEVKFSEVAIFLVERKMGSSRRKFLTNLARSKGFRIEDVLSDAVTHVVAEDNSADELWQWLQNSSLGDLSKIEVLDISWFTECMEAGKPVQVEARHCLVKRCPVIDQYLEPSTVETVSQYACQRRTTMENHNQIFTDAFAILAENAEFNESEGPCLAFRRAASLLKSLPHAISSSKDLEGLPCLGDQTKAVIEDILEYGQCSKVQDVLCDDRYQTIKLFTSVFGVGLKTAEKWYRKGFHSLEEVQADKAIHFTKMQRAGFLYYDDISAAVCKAEADAIGQIVEETVRLIAPDAIVTLTGGFRRGKECGHDVDFLITTPEMGKEVWLLNRLINRLQNQGILLYYDIVESTFDKTRLPCRKFEAMDHFQKCFAIIKLKKELAARRVQKDWKAIRVDFVMPPVDNFAFALLGWTGSRQFERDLRRFARHERKMLLDNHALYDKTKKIFLPAKTEEDIFAHLGLDYIPPWQRNA

SEQ ID NO: 122 - protein, 494 aa, Artificial Sequence
  Modified TdT Sequences
MLHIPIFPPIKKRQKLPESRNSCKYEVKFSEVAIFLVERKMGSSRRKFLTNLARSKGFRIEDVLSDAVTHVVAEDNSADELWQWLQNSSLGDLSKIAVLDISWFTECMGAGKPVQVEARHCLVKSCPVIDQYLEPSTVETVSQYACQRRTTMENHNQIFTDAFAILAENAEFNESEGPCLAFRRAASLLKSLPHAISSSKDLEGLPCLGDQTKAVIQDILEYGQCSKVQDVLCDDRYQTIKLFTSVFGVGLKTAEKWYRKGLHSLEEVQADNAIHFTKMQKAGFLYYDDISAAVCKAEADAIGQIVEETVRLIAPDAIVTLTGGFRRGKECGHDVDFLITTPEMGKEVWLLNRLINRLQNQGILLYYDIVESTFDKTRLPCRKFEAMDHFQKCFAIIKLKKELAAGRVQKDWKAIRVDFVVPPVDNFAFALLGWTGSRQFERDLRRFARHERKMLLDNHALYDKTKKIFLPAKTEEDIFAHLGLDYIPPWQRNA

SEQ ID NO: 123 - protein, 494 aa, Artificial Sequence
  Modified TdT Sequences
MLHIPIFPPIKKRQKLPESRNSCKYEVKFSEVAIFLVERKMGSSRRKFLTNLARSKGFRIENVLSDAVTHVVAEDNSADELWQWLQNSSLGDLSKIEVLDISWFTECMEAGKPVQVEARHCLVKSCPVIDQYLEPSTVETVSQYACQRRTTMENHNQIFTDAFAILAENAEFNESEGPCLAFRRAASLLKSLPHAISSSKDLEGLPCLGDQTKAVIEDILEYGQCSKVQDVLCDDRYQTIKLFTSVFGVGLKTAEKWYRKGFHSLEEVQADKAIHFTKMQKAGFLYYDDISAAVCKAEADAIGQIVEETVRLIAPDAIVTLTGGFRRGKECGHDVDFLITTPEMGKEVWLLQRLINRLQKQGILLYYDIVESTFDKTRLPCRKFEAMDHFQKCFAIIKLKKELAAGRVQKDWKAIRVDFVMPPVDNFAFALLGWTGSRQFERDLRRFARHERKMLLDNHALYDKTKKIFLPAKTEEDIFAHLGLDYIPPWQRNA

SEQ ID NO: 124 - protein, 494 aa, Artificial Sequence
  Modified TdT Sequences
MLHIPIFPPIKKRQKLPESRNSCKYEVKFSEVAIFLVERKMGSSRRKFLTNLARSKGFRIEDVLSDAVTHVVAEDNSADELWQWLQNSSLGDLSKIEVLDISWFTECMGAGKPVQVEARHCLVKSCPVIDQYLEPSTVETVSQYACQRRTTMENHNQIFTDAFAILAENAEFNESEGPCLAFRRAASLLKSLPHAISSSKDLEGLPCLGDQTKAVIQDILEYGQCSKVQDVLCDDRYQTIKLFTSVFGVGLKTAEKWYRKGFHSLEEVQADNAIHFTKMQKAGFLYYDDINAAVCKAEAQAIGQIVEETVRLIAPDAIVTLTGGFRRGKECGHDVDFLITTPEMGKEVWLLNRLINRLQNQGILLYYDIVESTFDKTRLPCRKFEAMDHFQKCFAIIKLKKELAAGRVQKDWKAIRVDFVAPPVDNFAFALLGWTGSRQFERDLRRFARHERKMLLDNHALYDKTKKIFLPAKTEEDIFAHLGLDYIPPWQRNA

SEQ ID NO: 125 - protein, 494 aa, Artificial Sequence
  Modified TdT Sequences
MLHIPIFPPIKKRQKLPESRNSCKYEVKFSEVAIFLVERKMGSSRRKFLTNLARSKGFRIEDVLSDAVTHVVAENNSADELWQWLQNSSLGDLSKIEVLDISWFTECMGAGKPVQVEARHCLVKSCPVIDQYLEPSTVETVSQYACQRRTTMENHNQIFTDAFAILAENAEFNESEGPCLAFRRAASLLKSLPHAISSSKDLEGLPCLGDQTKAVIEDILEYGQCSKVQDVLCDDRYQTIKLFTSVFGVGLKTAEKWYRKGFHSLEEVQADNAIHFTKMQRAGFLYYDDISAAVCKAEADAIGQIVEETVRLIAPDAIVTLTGGFRRGKECGHDVDFLITSPEMGKEVWLLNRLINRLQNQGILLYYDIVESTFDKTRLPCRKFEAMDHFQKCFAIIKLKKELAAGRVQKDWKAIRVDFVAPPVDNFAFALLGWTGSRQFERDLRRFARHERKMLLDNHALYDKTKKIFLPAKTEEDIFAHLGLDYIPPWQRNA

SEQ ID NO: 126 - protein, 494 aa, Artificial Sequence
  Modified TdT Sequences
MLHIPIFPPIKKRQKLPESRNSCKYEVKFSEIAIFLVERKMGSSRRKFLTNLARSKGFRIEDVLSDAITHVVAEDNSADELWQWLQNSSLGDLSKIEVLDISWFTECMEAGKPVQVEARHCLVKSCPVIDQYLEPSTVETVSQYACQRRTTMENHNQIFTDAFAILAENAEFNESEGPCLAFRRAASLLKSLPHAISSSKDLEGLPCLGDQTKAVIEDILEYGQCSKVQDVLCDDRYQTIKLFTSVFGVGLKTAEKWYRKGFHSLEEVQADKAIHFTKMQKAGFLYYDDISAAVCKAEADAIGQIVEETVRLIAPDAIVTLTGGFRRGKECGHDVDFLITTPEMGKEVWLLNRLINRLQNQGLLLYYDIVESTFDKTRLPCRKFEAMDHFQKCFAIIKLKKELAAGRVQKDWKAIRVDFVMPPVDNFAFALLGWTGSRQFERDLRRFARHERKMLLDNHALYDKTKKIFLPAKTEEDIFAHLGLDYIPPWQRNA

SEQ ID NO: 127 - protein, 494 aa, Artificial Sequence
  Modified TdT Sequences
MLHIPIFPPIKKRQKLPESRNSCKYEVKFSEVAIFLVERKMGSSRRKFLTNLGRSKGFRIEDVLSDAVTHVVAEDNSADELWQWLQNSSLGDLSKIEVLDISWFTECMGAGKPVQVEARHCLVKSCPVIDQYLEPSTVETVSQYACQRRTTMENHNQIFTDAFAILAENAEFNESEGPCLAFRRAASLLKSLPHAISSSKDLEGLPCLGDQTKAVIEDILEYGQCSKVQDVLCDDRYQSIKLFTSVFGVGLKTAEKWYRKGFHSLEEVQADNAIHFTKMQKAGFLYYDDISAAVCKAEADAIGQIVEETVRLIAPDAIVTLTGGFRRGKECGHDVDFLITTPEMGKEVWLLNRLINRLQNQGILLYYDIVESTFDKTRLPCRKFEAMDHFQKCFAIIKLKKELAAGRVQKDWKAIRVDFVVPPVDNFAFALLGWTGSRQFERDLRRFARHERKMLLDNHALYDKTKKIFLPAKTEEDIFAHLGLDYIPPWQRNA

SEQ ID NO: 128 - protein, 494 aa, Artificial Sequence
  Modified TdT Sequences
MLHIPIFPPIKKRQKLPESRNSCKYEVKFSEVAIFLVERKMGSSRRKFLTNLARSKGFRIEDVLSDAVTHVVAEDNSADELWQWLQNSSLGDLSKIEVLDISWFTECMGAGKPVQVEARHCLVKSCPVIDQYLEPSTVETVSQYACQRRTTMENHNQIFTDAFAILAENAEFNESEGPCLAFRRAASLLKSLPHAISSSKDLEGLPCLGDQTKRVIEDILEYGQCSKVQDVLCDDRYQTIKLFTSVFGVGLKTAEKWYRKGFHSLEEVKADNAIHFTKMQKAGFLYYDDISAAVCKAEADAIGQIVEETVRLIAPDAIVTLTGGFRRGKECGHDVDFLITTPEMGKEVWLLNRLINRLQNQGILLYYDIVESTFDKTRLPCRKFEAMDHFQKCFAIIKLKKELAAGRVQKDWKAIRVDFVAPPVDNFAFALLGWTGSRQFERDLRRFARHERKMLLDNHALYDKTKKIFLPAKTEEDIFAHLGLDYIDPWQRNA

SEQ ID NO: 129 - protein, 494 aa, Artificial Sequence
  Modified TdT Sequences
MLHIPIFPPIKKRQKLPESRNSCKYEVKFSEVAIFLVERKMGSSRRKFLTNLARSKGFRIEDVLSDAVTHVVAEDNSADELWQWLQNSSLRDLSKIEVLDISWFTECMEAGKPVQIEARHCLVKSCPVIDQYLEPSTVETVSQYACQRRTTMENHNQIFTDAFAILAENAEFNESEGPCLAFRRAASLLKSLPHAISSSKDLEGLPCLGDQTKAVIEDILEYGQCSKVQDVLCDDRYQTIKLFTSVFGVGLKTAEKWYRKGFHSLEEVQADKAIHFTKMQKAGFLYYDDISAAVCKAEADAIGQIVEETVRLIAPDAIVTLTGGFRRGKECGHDVDFLITTPEMGKEVWLLNRLINRLQNQGILLYYDIVESTFDKTRLPCRKFEAMDHFQKCFAIIKLKKELAAGRVQKDWKAIRVDFVACPVDNFAFALLGWTGSRQFERDLRRFARHERKMLLDNHALYDKTKKIFLPAKTEEDIFAHLGLDYIPPWQRNA

SEQ ID NO: 130 - protein, 494 aa, Artificial Sequence
  Modified TdT Sequences
MLHIPIFPPIKKRQKLPESRNSCKYEVKFSEVAIFLVERKMGASRRKFLTNLARSKGFRIEDVLSDAVTHVVAEDNSADELWQWLQNSSLGDLSKIEVLDISWFTECMGAGKPVQVEARHCLVKSCPVIDQYLEPSTVETVSQYACQRRTTMENHNQIFTDAFAILAENAEFNESEGPCLAFRRAASLLKSLPHAISSSKDLEGLPCLGDQTKAVIEDILEYGQCSKVQDVLCDDRYQTIKLFTSVFGVGLKTAEKWYRKGFHSLEEVQADNSIHFTKMQKAGFLYYDDISAAVCKAEADAIGQIVEETVRLIAPDAIVTLTGGFRRGKECGHDVDFLITTPEMGKEVWLLNRLINRLQNQGILLYYDIVESTFDKTRLPCRKFEAMDHFQKCFAIIKLKKELAAGRVQKDWKAIRVDFVAPPYDNFAFALLGWTGSRQFERDLRRFARHERKMLLDNHALYDKTKKIFLPAKTEEDIFAHLGLDYIPPWQRNA

SEQ ID NO: 131 - protein, 494 aa, Artificial Sequence
  Modified TdT Sequences
MLHIPIFPPIKKRQKLPESRNSCKYEVKFSEVAIFLVERKMGSSRRKFLTNLARSKGFRIEDVLSDAVTHVVAEDNSADELWQWLQNSSLGDLSKIEVLDISWFTECMGAGKPVEVEARHCLVKSCPVIDQYLEPSTVETVSQYACQRRTTMENHNQIFTDAFAILAENAEFNESEGPCLAFRRAASLLKSLPHPISSSKDLEGLPCLGDQTKAVIEDILEYGQCSKVQDVLCDDRYQTIKLFTSVFGVGLKTAEKWYRKGFHSLEEVQADNSIHFTKMQKAGFLYYDDISAAVCKAEADAIGQIVEETVRLIAPDAIVTLTGGFRRGKECGHDVDFLITTPEMGKEVWLLNRLINRLQNQGILLYYDIVESTFDKTRLPCRKFEAMDHFQKCFAIIKLKKELAAGRVQKDWKAIRVDFVACPVDNFAFALLGWTGSRQFERDLRRFARHERKMLLDNHALYDKTKKIFLPAKTEEDIFAHLGLDYIPPWQRNA

SEQ ID NO: 132 - protein, 494 aa, Artificial Sequence
  Modified TdT Sequences
MLHIPIFPPIKKRQKLPESRNSCKYEVKFSEVAIFLVERKMGSSRRKFLTNLARSKGFRIEDVLSDAVTHVVAEDNSADELWQWLQNSSLGDLSKIEVLDISWFTECMGAGKPVQVEARHCLVKSCPVIDQYLEPSTVETVSQYACQRRTTMENHNQIFTDAFAILAENAEFNESEGPCLAFRRAASLLKSLPHAISSSKDLEGLPCLGDQTSAVIEDILEYGQCSKVQDVLCDDRYQTIKLFTSVFGVGLKTAEKWYRKGFHSLEEVQADNAIHFTKMQKAGFLYYDDISAAVCKAEAQAIGQIVEETVRLIAPDAIVTLTGGFRRGKECGHDVDFLITSPEMGKEVWLLNRLINRLQNQGILLYYDIVESTFDKTRLPCRKFEAMDHFQKCFAIIKLKKELAAGRVQKDWKAIRVDFVVPPVDNFAFALLGWTGSRQFERDLRRFARHERKMLLDNHALYDKTKKIFLPAKTEEDIFAHLGLDYIPPWQRNA

SEQ ID NO: 133 - protein, 494 aa, Artificial Sequence
  Modified TdT Sequences
MLHIPIFPPIKKRQKLPESRNSCKYEVKFSEVAIFLVERKMGSSRRKFLTNLARSKGFRIEDVLSDAVTHIVAEDNSADELWQWLQNSSLGDLSKIEVLDISWFTECMGAGKPVQVEARHCLVKSCPVIDQYLEPSTVETVSQYACQRRTTMENHNQIFTDAFAILAENAEFNESEGPCLAFRRAASLLKSLPHAISSSKDLEGLPCLGDQTKAVIQDILEYGQCSKVQDVLCDDRYQTIKLFTSVFGVGLKTAEKWYRKGFHSLEEVQADNAIHFTKMQKAGFLYYDDISAAVCKAEADAIGQIVEETVRLIAPDAIVTLTGGFRRGKECGHDVDFLITTPEMGKEVWLLNRLINRLQNQGILLYYDIVESTFDKTRLPCRKFEAMDHFQKCFAIIKLKKELAAGRVQKDWKAIRVDFVACPVDNFAFALLGWTGSRQFERDLRRFARHERKMLLDNHALYDKTKKIFLPAKTEEDIFAHLGLDYIPPWQRNA

SEQ ID NO: 134 - protein, 494 aa, Artificial Sequence
  Modified TdT Sequences
MLHIPIFPPIKKRQKLPESRNSCKYEVKFSEVAIFLVERKMGSSRRKFLTNLARSKGFRIEDVLSDAVTHVVAEQNSADELWQWLQNSSLGDLSKIEVLDISWFTECMEAGKPVQIEARHCLVKSCPVIDQYLEPSTVETVSQYACQRRTTMENHNQIFTDAFAILAENAEFNESEGPCVAFRRAASLLKSLPHAISSSKDLEGLPCLGDQTKAVIEDILEYGQCSKVQDVLCDDRYQTIKLFTSVFGVGLKTAEKWYRKGFHSLEEVQADKAIHFTKMQKAGFLYYDDISAAVCKAEADAIGQIVEETVRLIAPDAIVTLTGGFRRGKECGHDVDFLITTPEMGKEVWLLNRLINRLQNQGILLYYDIVESTFDKTRLPCRKFEAMDHFQKCFAIIKLKKELAAGRVQKDWKAIRVDFVMPPVDNFAFALLGWTGSRQFERDLRRFARHERKMLLDNHALYDKTKKIFLPAKTEEDIFAHLGLDYIPPWQRNA

SEQ ID NO: 135 - protein, 494 aa, Artificial Sequence
  Modified TdT Sequences
MLHIPIFPPIKKRQKLPESRNSCKYEVKFSEVAIFLVERKMGSSRRKFLTNLARSKGFRIEDVLSDAVTHVVAEDNSADELWQWLQNSSLGDLSKIEVLDISWFTECMEAGKPVQVEARHCLVKSCPVIDQYLEPSTVETVSQYACQRRTTMENHNRIFTDAFAILAENAEFNESEGPCLAFRRAASLLKSLPHAISSSKDLEGLPCLGDQTKAVIEDILEYGQCSKVQDVLCDDRYQTIKLFTSVFGVGLKTAEKWYRKGFHSLEEVQADKAIHFTKMQKAGFLYYDDISAAVCKAEADAIGQIVEETVRLIAPDAIVTLTGGFRRGKECGHDVDFLITTPEMGKEVWLLNRLINRLQNKGILLYYDIVESTFDKTRLPCRKFEAMDHFQKCFAIIKLKKELAAGRVQKDWKAIRVDFVACPVDNFAFALLGWTGSRQFERDLRRFARHERKMLLDNHALYDKTKKIFLPAKTEEDIFAHLGLDYIPPWQRNA

SEQ ID NO: 136 - protein, 494 aa, Artificial Sequence
  Modified TdT Sequences
MLHIPIFPPIKKRQKLPESRNSCKYEVKFSEVAIFLVERKMGASRRKFLTNLARSKGFRIEDVLSDAVTHVVAEDNSADELWQWLQNSSLGDLSKIEVLDISWFTECMGAGKPVQVEARHCLVKSCPVIDQYLEPSTVETVSQYACQRRTTMENHNQIFTDAFAVLAENAEFNESEGPCLAFRRAASLLKSLPHAISSSKDLEGLPCLGDQTKAVIEDILEYGQCSKVQDVLCDDRYQTIKLFTSVFGVGLKTAEKWYRKGFHTLEEVQADNAIHFTKMQKAGFLYYDDISAAVCKAEAQAIGQIVEETVRLIAPDAIVTLTGGFRRGKECGHDVDFLITTPEMGKEVWLLNRLINRLQNQGILLYYDIVESTFDKTRLPCRKFEAMDHFQKCFAIIKLKKELAAGRVQKDWKAIRVDFVAPPVDNFAFALLGWTGSRQFERDLRRFARHERKMLLDNHALYDKTKKIFLPAKTEEDIFAHLGLDYIPPWQRNA

SEQ ID NO: 137 - protein, 494 aa, Artificial Sequence
  Modified TdT Sequences
MLHIPIFPPIKKRQKLPESRNSCKYEVKFSEVAIFLVERKMGSSRRKFLTNLARSKGFRIEDVLSDAVTHVVAEDNSADELWQWLQNSSLGDLSKIEVLDISWFTECMGAGKPVQIEARHCLVKSCPVIDQYLEPSTVETVSQYACQRRTTMENHNQIFTDAFAILAENAEFNESEGPCLAFRRAASLLKSLPHAISSSKDLEGLPCLGDQTKAVIEDILEYGQCSKVQDVLCDDRYQTIKLFTSVFGVGLKTAEKWYRKGFHSLEEVQADNAIHFTKMQKAGFLYYDDISAAVCKAEADAIGQIVEETVRLIAPDAIVTLTGGFRRGKECGHDVDFLITTPEMGKEVWLLNRLINRLQNQGILLYYDIVESTFDKTRLPCRKFEAMDHFQKCFAIIKLKKELAAGRVQKDWKAIRVDFVACPVDNFAFALLGWTGSRQFERDLRRWARHERKMILDNHALYDKTKKIFLPAKTEEDIFAHLGLDYIPPWQRNA

SEQ ID NO: 138 - protein, 494 aa, Artificial Sequence
  Modified TdT Sequences
MLHIPIFPPIKKRQKLPESRNSCKYEVKFSEVAIFLVERKMGSSRRKFLTNLARSKGFRIEDVLSDAVTHVVAEDNSADELWQWLQNSSLRDLSKIEVLDISWFTECMEAGKPVQVEARHCLVKRCPVIDQYLEPSTVETVSQYACQRRTTMENHNQIFTDAFAILAENAEFNESEGPCLAFRRAASLLKSLPHAISSSKDLEGLPCLGDQTKAVIEDILEYGQCSKVQDVLCDDRYQTIKLFTSVFGVGLKTAEKWYRKGFHSLEEVQADKAIHFTKMQKAGFLYYDDISAAVCKAEADAIGQIVEETVRLIAPDAIVTLTGGFRRGKNCGHDVDFLITTPEMGKEVWLLNRLINRLQNQGILLYYDIVESTFDKTRLPCRKFEAMDHFQKCFAIIKLKKELAAGRVQKDWKAIRVDFVMPPVDNFAFALLGWTGSRQFERDLRRFARHERKMLLDNHALYDKTKKIFLPAKTEEDIFAHLGLDYIPPWQRNA

SEQ ID NO: 139 - protein, 494 aa, Artificial Sequence
  Modified TdT Sequences
MLHIPIFPPIKKRQKLPESRNSCKYEVKFSEVAIFLVERKMGSSRRKFLTNLARSKGFRIEDVLSDAVTHVVAEDNSADELWQWLQNSSLGDLSKIEVLDISWFTECMEAGKPVQIEARHCLVKSCPVIDQYLEPSTVETVSQYACQRRTTMENHNQIFTDAFAILAENAEFNESEGPCLAFRRAASLLKSLPHAISSSKDLEGLPCLGDQSKAVIEDILEYGQCSKVQDVLCDDRYQTIKLFTSVFGVGLKTAEKWYRKGFHSLEEVQADKAIHFTKMQKAGFLYYDDISAAVCKAEADAIGQIVEETVRLIAPDAIVTLTGGFRRGKECGHDVDFLITTPEMGKEVWLLNRLINRLQNQGILLYYDIVESTFDKTRLPCRKFEAMDHFQKCFAIIKLKKELAAGRVQKDWKAIRVDFVMCPVDNFAFALLGWTGSRQFERDLRRFARHERKMLLDNHALYDKTKKIFLPAKTEEDIFAHLGLDYIPPWQRNA

SEQ ID NO: 140 - protein, 494 aa, Artificial Sequence
  Modified TdT Sequences
MLHIPIFPPIKKRQKLPESRNSCKYEVKFSEVAIFLVERKMGSSRRKFLTNLARSKGFRIEDVLSDAVTHVVAENNSADELWQWLQNSSLGDLSKIEVLDISWFTECMEAGKPVQVEARHCLVKSCPVIDQYLEPSTVETVSQYACQRRTTMENHNQIFTDAFAILAENAEFNESEGPCLAFRRAASLLKSLPHAISSSKDLEGLPCLGDQTKAVIEDILEYGQCSKVQDVLCDDRYQSIKLFTSVFGVGLKTAEKWYRKGFHSLEEVQADNAIHFTKMQKAGFLYYDDISAAVCKAEADAIGQIVEETVRLIAPDAIVTLTGGFRRGKECGHDVDFLITTPEMGKEVWLLNRLINRLQNQGILLYYDIVESTFDKTRLPCRKFEAMDHFQKCFAIIKLKKELAAGRVQKDWKAIRVDFVAPPVDNFAFALLGWTGSRQFERDLRRFARHERKMLLDNHALYDKTKKIFLPAKTEEDIFAHLGLDYIPPWQRNA

SEQ ID NO: 141 - protein, 494 aa, Artificial Sequence
  Modified TdT Sequences
MLHIPIFPPIKKRQKLPESRNSCKYEVKFSEVVIFLVERKMGSSRRKFLTNLARSKGFRIEDVLSDAVTHVVAEDNSADELWQWLQNSSLGDLSKIEVLDISWFTECMEAGKPVQVEARHCLVKSCPVIDQYLEPSTVETVSQYACQRRTTMENCNQIFTDAFAILAENAEFNESEGPCLAFRRAASLLKSLPHAISSSKDLEGLPCLGDQTKAVIEDILEYGQCSKVQDVLCDDRYQTIKLFTSVFGVGLKTAEKWYRKGFHSLEEVQADKAIHFTKMQKAGFLYYDDISAAVCKAEADAIGQIVEETVRLIAPDAIVTLTGGFRRGKECGHDVDFLITTPEMGKEVWLLNRLINRLQNQGILLYYDIVESTFDKTRLPCRKFEAMDHFQKCFAIIKLKKERAAGRVQKDWKAIRVDFVMPPVDNFAFALLGWTGSRQFERDLRRFARHERKMLLDNHALYDKTKKIFLPAKTEEDIFAHLGLDYIPPWQRNA

SEQ ID NO: 142 - protein, 494 aa, Artificial Sequence
  Modified TdT Sequences
MLHIPIFPPIKKRQKLPESRNSCKYEVKFSEVVIFLVERKMGSSRRKFLTNLARSKGFRIEDVLSDAVTHVVAEDNSADELWQWLQNSSLGDLSKIEVLDISWFTECMEAGKPVQVEARHCLVKSCPVIDQYLEPSTVETVSPYACQRRTTMENHNQIFTDAFAILAENAEFNESEGPCLAFRRAASLLKSLPHAISSSKDLEGLPCLGDQTKAVIEDILEYGQCSKVQDVLCDDRYQTIKLFTSVFGVGLKTAEKWYRKGFHSLEEVQADKAIHFTKMQKAGFLYYDDISAAVCKAEADAIGQIVEETVRLIAPDAIVTLTGGFRRGKECGHDVDFLITTPEMGKEVWLLNRLINRLQNQGILLYYDIVESTFDKTRLPCRKFEAMDHFQKCFAIIKLKKELAAGRVQKDWKAIRVDFVMCPVDNFAFALLGWTGSRQFERDLRRFARHERKMLLDNHALYDKTKKIFLPAKTEEDIFAHLGLDYIPPWQRNA

SEQ ID NO: 143 - protein, 494 aa, Artificial Sequence
  Modified TdT Sequences
MLHIPIFPPIKKRQKLPESRNSCKYEVKFSEVAIFLVERKMGSSRRKFLTNLARSKGFRIEDVLSDAVTHVVAEDNSADELWQWLQNSSLGDLSKIEVLDISWFTECMGAGKPVQSEARHCLVKSCPVIDQYLEPSTVETVSQYACQRRTTMENHNQIFTDAFAILAENAEFNESEGPCLAFRRAASLLKSLPHAISSSKDLEGLPCLGDQTKAVIEDILEYGQCSKVQDVLCDDRYQTIKLFTSVFGVGLKTAEKWYRKGFHSLEEVQADNAIHFTKMQKAGFLYYDDISAAVCKAEADAIGQIVEEAVRLIAPDAIVTLTGGFRRGKECGHDVDFLITTPEMGKEVWLLNRLINRLQNQGILLYYDIVESTFDKTRLPCRKFEAMDHFQKCFAIIKLKKELAAGRVQKDWKAIRVDFVACPVDNFAFALLGWTGSRQFERDLRRFARHERKMLLDNHALYDKTKKIFLPAKTEEDIFAHLGLDYIPPWQRNA

SEQ ID NO: 144 - protein, 494 aa, Artificial Sequence
  Modified TdT Sequences
MLHIPIFPPIKKRQKLPESRNSCKYEVKFSEVAIFLVERKMGSSRRKFLTNLARSKGFRIEDVLSDAVTHVVAEQNSADELWQWLQNSSLGDLSKIEVLDISWFTECMEAGKPVQVEARHCLVKSCPVIDQYLEPSTVETVSQYACQRRTTMENHNRIFTDAFAILAENAEFNESEGPCLAFRRAASLLKSLPHAISSSKDLEGLPCLGDQTKAVIEDILEYGQCSKVQDVLCDDRYQTIKLFTSVFGVGLKTAEKWYRKGFHSLEEVQADNAIHFTKMQKAGFLYYDDISAAVCKAEADAIGQIVEETVRLIAPDAIVTLTGGFRRGKECGHDVDFLITTPEMGKEVWLLNRLINRLQNQGILLYYDIVESTFDKTRLPCRKFEAMDHFQKCFAIIKLKKELAAGRVQKDWKAIRVDFVMPPVDNFAFALLGWTGSRQFERDLRRFARHERKMLLDNHALYDKTKKIFLPAKTEEDIFAHLGLDYIPPWQRNA

SEQ ID NO: 145 - protein, 494 aa, Artificial Sequence
  Modified TdT Sequences
MLHIPIFPPIKKRQKLPESRNSCKYEVKFSEVAIFLVERKMGSSRRKFLTNLARSKGFRIEDVLSDAVTHVVAEDNSADELWQWLQNSSLGDLSKIEVLDISWFTECMEAGKPVQVEARHCLVKSCPVIDQYLEPSAVETVSPYACQRRTTMENHNQIFTDAFAILAENAEFNESEGPCLAFRRAASLLKSLPHAISSSKDLEGLPCLGDQTKAVIEDILEYGQCSKVQDVLCDDRYQTIKLFTSVFGVGLKTAEKWYRKGFHSLEEVQADKAIHFTKMQKAGFLYYDDISAAVCKAEADAIGQIVEETVRLIAPDAIVTLTGGFRRGKECGHDVDFLITTPEMGKEVWLLNRLINRLQNQGILLYYDIVESTFDKTRLPCRKFEAMDHFQKCFAIIKLKKELAAGRVQKDWKAIRVDFVMCPVDNFAFALLGWTGSRQFERDLRRFARHERKMLLDNHALYDKTKKIFLPAKTEEDIFAHLGLDYIPPWQRNA

SEQ ID NO: 146 - protein, 494 aa, Artificial Sequence
  Modified TdT Sequences
MLHIPIFPPIKKRQKLPESRNSCKYEVKFSEVAIFLVERKMGSSRRKFLTNLARSKGFRIEDVLSDAVTHVVAENNSADELWQWLQNSSLGDLSKIEVLDISWFTECMGAGKPVQVEARHCLVKSCPVIDQYLEPSTVETVSQYACQRRTTMENHNQIFTDAFAILAENAEFNESEGPCLAFRRAASLLKSLPHPISSSKDLEGLPCLGDQTKAVIEDILEYGQCSKVQDVLCDDRYQTIKLFTSVFGVGLKTAEKWYRKGFHSLEEVKADNAIHFTKMQKAGFLYYDDISAAVCKAEADAIGQIVEETVRLIAPDAIVTLTGGFRRGKECGHDVDFLITTPEMGKEVWLLNRLINRLQNQGILLYYDIVESTFDKTRLPCRKFEAMDHFQKCFAIIKLKKELAAGRVQKDWKAIRVDFVAPPVDNFAFALLGWTGSRQFERDLRRFARHERKMLLDNHALYDKTKKIFLPAKTEEDIFAHLGLDYIPPWQRNA

SEQ ID NO: 147 - protein, 494 aa, Artificial Sequence
  Modified TdT Sequences
MLHIPIFPPIKKRQKLPESRNSCKYEVKFSEVAIFLVERKMGSSRRKFLTNLARSKGFRIEDVLSDAVTHVVAEDNSADELWQWLQNSSLGDLSKIEVLDISWFTECMGAGRPVQVEARHCLVKSCPVIDQYLEPSTVETVSQYACQRRTTMENHNQIFTDAFAILAENAEFNESEGPCLAFRRAASLLKSLPHAISSSKDLEGLPCLGDQTSAVIEDILEYGQCSKVQDVLCDDRYQTIKLFTSVFGVGLKTAEKWYRKGFHSLEEVQADNAIHFTKMQKAGFLYYDDISAAVCKAEADAIGQIVEETVRLIAPDAIVTLTGGFRRGKECGHDVDFLITTPQMGKEVWLLNRLINRLQNQGILLYYDIVESTFDKTRLPCRKFEAMDHFQKCFAIIKLKKELAAGRVQKDWKAIRVDFVAPPVDNFAFALLGWTGSRQFERDLRRFARHERKMLLDNHALYDKTKKIFLPAKTEEDIFAHLGLDYIPPWQRNA

SEQ ID NO: 148 - protein, 494 aa, Artificial Sequence
  Modified TdT Sequences
MLHIPIFPPIKKRQKLPESRNSCKYEVKFSEVAIFLVERKMGSSRRKFLTNLARSKGFRIEDVLSDAVTHVVAEDNSADELWQWLQNSSLGDLSKIEVLDISWFTECMEAGKPVQVEARHCLVKSCPVIDQYLEPSTVETVSQYACQRRTTMENHNQIFTDAFAILAENAEFNESEGPCLAFRRAASLLKSLPHAISSSKDLEGLPCLGDQTKAVIEDILEYGQCSKVQDVLCDDRYQTIKLFTSVFGVGLKTAEKWYRKGFHSLEEVKADNAIHFTKMQKAGFLYYDDISAAVCKAEADAIGQIVEETVRLIAPDAIVTLTGGFRRGKECGHDVDFLITTPEMGKEVWLLNRLINRLQNQGILLYYDIVESTFDKTRLPCRKFEAMDHFQKCFAIIKLKKELAAGRVQKDWKAIRVDFVAAPVDNFAFALLGWTGSRQFERDLRRFARHERKMLLDNHALYDKTKKIFLPAKTEEDIFAHLGLDYIPPWQRNA

SEQ ID NO: 149 - protein, 494 aa, Artificial Sequence
  Modified TdT Sequences
MLHIPIFPPIKKRQKLPESRNSCKYEVKFSEVAIFLVERKMGSSRRKFLTNLARSKGFRIEDVLSDAVTHVVAEDNSADELWQWLQNSSLGDLSKIEVLDISWFTECMGAGKPVQVEARHCLVKSCPVIDQYLEPSTVETVSQYACQRRTTMENHNQIFTDAFAILAENAEFNESEGPCLAFRRAASLLKSLPHAISSSKDLEGLPCLGDQTKAVIEDILEYGQCSKVQDVLCDDRYQTIKLFTSVFGVGLKTAEKWYRKGLHSLEEVQADNAIHFTKMQRAGFLYYDDISAAVCKAEADAIGQIVEETVRLIAPDAIVTLTGGFRRGKECGHDVDFLITTPEMGKEVWLLNRLINRLQNQGILLYYDIVESTFDKTRLPCRKFEAMDHFQKCFAIIKLKKELAAGRVQKDWKAIRVDFVACPVDNFAFALLGWTGSRQFERDLRRFARHERKMLLDNHALYDKTKKIFLPAKTEEDIFAHLGLDYIPPWQRNA

SEQ ID NO: 150 - protein, 494 aa, Artificial Sequence
  Modified TdT Sequences
MLHIPIFPPIKKRQKLPESRNSCKYEVKFSEVAIFLVERKMGSSRRKFLTNLARSKGFRIEDVLSDAITHVVAEDNSADELWQWLQNSSLGDLSKIEVLDISWFTECMEAGKPVQVEARHCLVKSCPVIDQYLEPSTVETVSQYACQRRTTMENHNQIFTDAFAILAENAEFNESEGPCLAFRRAASLLKSLPHAISSSKDLEGLPCLGDQTKAVIEDILEYGQCSKVQDVLCDDRYQTIKLFTSVFGVGLKTAEKWYRKGFHSLEEVQADKAIHFTKMQKAGFLYYDDISAAVCRAEADAIGQIVEETVRLIAPDAIVTLTGGFRRGKECGHDVDFLITTPEMGKEVWLLNRLINRLQNQGILLYYDIVESTFDKTRLPCRKFEAMDHFQKCFAIIKLKKELAAGRVQKDWKAIRVDFVMCPVDNFAFALLGWTGSRQFERDLRRFARHERKMLLDNHALYDKTKKIFLPAKTEEDIFAHLGLDYIPPWQRNA

SEQ ID NO: 151 - protein, 494 aa, Artificial Sequence
  Modified TdT Sequences
MLHIPIFPPIKKRQKLPESRNSCKYEVKFSEVAIFLVERKMGSSRRKFLTNLARSKGFRIEDVLSDAVTHVVAEDNSADELWQWLQNSSLGDLSKIEVLDISWFTECMGAGKPVQVEARHCLVKSCPVIDQYLEPSTVETVSQYACQRRTTMENHNQIFTDAFAILAENAEFNESEGPCLAFRRAASLLKSLPHAISSSKDLEGLPCLGDQTKAVIEDILEYGQCSKVQDVLCDDRYQTIKLFTSVFGVGLKTAEKWYRKGFHSLEEVQADNAIHFTKMQKAGFLYYDDISAAVCKAEADAIGQIVEETVRLIAPDAIVTLTGGFRRGKECGHDVDFLITSPEMGKEVWLLNRLINRLQNQGILLYYDIVESTFDKTRLPCRKFEAMDHFQKCFAIIKLKKELAAGRVQKDWKAIRVDFVACPVDNFAFALLGWTGSRQFERDLRRFARHEKKMLLDNHALYDKTKKIFLPAKTEEDIFAHLGLDYIPPWQRNA

SEQ ID NO: 152 - protein, 494 aa, Artificial Sequence
  Modified TdT Sequences
MLHIPIFPPIKKRQKLPESRNSCKYEVKFSEVAIFLVERKMGSSRRKFLTNLARSKGFRIEDVLSDAVTHIVAEDNSADELWQWLQNSSLGDLSKIEVLDISWFTECMGAGKPVQVEARHCLVKSCPVIDQYLEPSTVETVSQYACQRRTTMENHNQIFTDAFAILAENAEFNESEGPCLAFMRAASLLKSLPHAISSSKDLEGLPCLGDQTKAVIEDILEYGQCSKVQDVLCDDRYQTIKLFTSVFGVGLKTAEKWYRKGFHSLEEVQADNAIHFTKMQKAGFLYYDDISAAVCKAEADAIGQIVEETVRLIAPDAIVTLTGGFRRGKECGHDVDFLITTPEMGKEVWLLNRLINRLQNQGILLYYDIVESTFDKTRLPCRKFEAMDHFQKCFAIIKLKKELAAGRVQKDWKAIRVDFVMPPVDNFAFALLGWTGSRQFERDLRRFARHERKMLLDNHALYDKTKKIFLPAKTEEDIFAHLGLDYIPPWQRNA

SEQ ID NO: 153 - protein, 494 aa, Artificial Sequence
  Modified TdT Sequences
MLHIPIFPPIKKRQKLPESRNSCKYEVKFSEVAIFLVERKMGASRRKFLTNLARSKGFRIEDVLSDAVTHVVAEDNSADELWQWLQNSSLGDLSKIEVLDISWFTECMGAGKPVQVEARHCLVKSCPVIDQYLEPSTVETVSQYACQRRTTMENHNQIFTDAFAILAENAEFNESEGPCLAFRRAASLLKSLPHAISSSKDLEGLPCLGDQTKAVIQDILEYGQCSKVQDVLCDDRYQTIKLFTSVFGVGLKTAEKWYRKGFHSLEEVQADNAIHFTKMQKAGFLYYDDISAAVCKAEADAIGQIVEETVRLIAPDAIVTLTGGFRRGKECGHDVDFLITTPEMGKEVWLLNRLINRLQNQGILLYYDIVESTFDKTRLPCRKFEAMDAFQKCFAIIKLKKELAAGRVQKDWKAIRVDFVAPPVDNFAFALLGWTGSRQFERDLRRFARHERKMLLDNHALYDKTKKIFLPAKTEEDIFAHLGLDYIPPWQRNA

SEQ ID NO: 154 - protein, 494 aa, Artificial Sequence
  Modified TdT Sequences
MLHIPIFPPIKKRQKLPESRNSCKYEVKFSEVAIFLVERKMGSSRRKFLTNLARSKGFRIEDVLSDAVTHVVAEDNSADELWQWLQNSSLGDLSKIEVLDISWFTECMGAGKPVQVEARHCLVKSCPVIDQYLEPSTVETVSQYACQRRTTMENHNQIFTDAFAILAENAEFNESEGPCLAFRRAASLLKSLPHPISSSKDLEGLPCLGDQTKAVIEDILEYGQCSKVQDVLCDDRYQTIKLFTSVFGVGLKTAEKWYRKGFHSLEEVQADNAIHFTKMQKAGFLYYDDISAAVCKAEADAIGQIVEETVRLIAPDAIVTLTGGFRRGKECGHDVDFLITTPEMGKEVWLLNRLINRLQNQGILLYYDIVESTFDKTRLPCRKFEAMDAFQKCFAIIKLKKELAAGRVQKDWKAIRVDFVAPPVDNFAFALLGWTGSRQFERDLRRFARHERKMLLDNHALYDKTKKIFLPAKTEEDIFAHLGLDYIDPWQRNA

SEQ ID NO: 155 - protein, 494 aa, Artificial Sequence
  Modified TdT Sequences
MLHIPIFPPIKKRQKLPESRNSCKYEVKFSEVAIFLVERKMGSSRRKFLTNLARSKGFRIEDVLSDAVTHVVAEDNSADELWQWLQNSSLGDLSKIEVLDISWFTECMEAGKPVQVEARHCLVKSCPVIDQYLEPSTVETVSQYACQRRTTMENHNQIFTDAFAILAENAEFNESEGPCLAFRRAASLLKSLPHAISSSRDLEGLPCLGDQTKAVIEDILEYGQCSKVQDVLCDDRYQTIKLFTSVFGVGLKTAEKWYRKGFHSLEEVQADKAIHFTKMQRAGFLYYDDISAAVCKAEADAIGQIVEETVRLIAPDAIVTLTGGFRRGKECGHDVDFLITTPEMGKEVWLLNRLINRLQNQGILLYYDIVESTFDKTRLPCRKFEAMDHFQKCFAIIKLKKELAAGRVQKDWKAIRVDFVMCPVDNFAFALLGWTGSRQFERDLRRFARHERKMLLDNHALYDKTKKIFLPAKTEEDIFAHLGLDYIPPWQRNA

SEQ ID NO: 156 - protein, 494 aa, Artificial Sequence
  Modified TdT Sequences
MLHIPIFPPIKKRQKLPESRNSCKYEVKFSEVAIFLVERKMGSSRRKFLTNLARSKGFRIEDVLSDAVTHIVAEDNSADELWQWLQNSSLGDLSKIEVLDISWFTECMGAGKPVQVEARHCLVKSCPVIDQYLEPSTVETVSQYACQRRTTMENHNQIFTDAFAILAENAEFNESEGPCLAFRRAASLLKSLPHAISSSKDLEGLPCLGDQTKAVIEDILEYGQCSKVQDVLCDDRYQSIKLFTSVFGVGLKTAEKWYRKGFHSLEEVQADNAIHFTKMQKAGFLYYDDISAAVCKAEADAIGQIVEETVRLIAPDAIVTLTGGFRRGKECGHDVDFLITTPQMGKEVWLLNRLINRLQNQGILLYYDIVESTFDKTRLPCRKFEAMDHFQKCFAIIKLKKELAAGRVQKDWKAIRVDFVAPPVDNFAFALLGWTGSRQFERDLRRFARHERKMLLDNHALYDKTKKIFLPAKTEEDIFAHLGLDYIPPWQRNA

SEQ ID NO: 157 - protein, 494 aa, Artificial Sequence
  Modified TdT Sequences
MLHIPIFPPIKKRQKLPESRNSCKYEVKFSEVAIFLVERKMGASRRKFLTNLARSKGFRIEDVLSDAVTHIVAEDNSADELWQWLQNSSLGDLSKIEVLDISWFTECMGAGKPVQVEARHCLVKSCPVIDQYLEPSTVETVSQYACQRRTTMENHNQIFTDAFAILAENAEFNESEGPCLAFRRAASLLKSLPHAISSSKDLEGLPCLGDQTKAVIEDILEYGQCSKVQDVLCDDRYQTIKLFTSVFGVGLKTAEKWYRKGFHSLEEVQADNAIHFTKMQKAGFLYYDDISAAVCKAEADAIGQIVEEAVRLIAPDAIVTLTGGFRRGKECGHDVDFLITTPEMGKEVWLLNRLINRLQNQGILLYCDIVESTFDKTRLPCRKFEAMDHFQKCFAIIKLKKELAAGRVQKDWKAIRVDFVAPPVDNFAFALLGWTGSRQFERDLRRFARHERKMLLDNHALYDKTKKIFLPAKTEEDIFAHLGLDYIPPWQRNA

SEQ ID NO: 158 - protein, 494 aa, Artificial Sequence
  Modified TdT Sequences
MLHIPIFPPIKKRQKLPESRNSCKYEVKFSEVAIFLVERKMGSSRRAFLTNLARSKGFRIEDVLSDAVTHVVAEDNSADELWQWLQNSSLGDLSKIEVLDISWFTECMGAGKPVQVEARHCLVKSCPVIDQYLEPSTVETVSQYACQRRTTMENHNKIFTDAFAILAENAEFNESEGPCLAFRRAASLLKSLPHAISSSKDLEGLPCLGDQTKRVIEDILEYGQCSKVQDVLCDDRYQTIKLFTSVFGVGLKTAEKWYRKGFHSLEEVQADNAIHFTKMQKAGFLYYDDISAAVCKAEADAIGQIVEETVRLIAPDAIVTLTGGFRRGKECGHDVDFLITTPEMGKEVWLLNRLINRLQNQGILLYYDIVESTFDKTRLPCRKFEAMDHFQKCFAIIKLKKELAAGRVQKDWKAIRVDFVAPPYDNFAFALLGWTGSRQFERDLRRFARHERKMLLDNHALYDKTKKIFLPAKTEEDIFAHLGLDYIPPWQRNA

SEQ ID NO: 159 - protein, 494 aa, Artificial Sequence
  Modified TdT Sequences
MLHIPIFPPIKKRQKLPESRNSCKYEVKFSEVAIFLVERKMGSSRRKFLTNLARSKGFRIEDVLSDAVTHVVAEDNSADELWQWLQNSSLGDLSKIEVLDISWFTECMEAGKPVQVEARHCLVKSCPVIDQYLEPSTVETVSQYACQRRTTMENHNQIFTDAFAILAENAEFNESEGPCVAFRRAASLLKSLPHAISSSKDLEGLPCLGDQTKAVIEDILEYGQCSKVQDVLCDDRYQTIKLFTSVFGVGLKTAEKWYRKGFHSLEEVQADKAIHFTKMQKAGFLYYDDISAAVCKAEADAIGQIVEETVRLIAPDAIVTLTGGFRRGKNCGHDVDFLITTPEMGKEVWLLNRLINRLQNQGILLYYDIVESTFDKTRLPCRKFEAMDHFQKCFAIIKLKKELAAGRVQKDWKAIRVDFVMAPVDNFAFALLGWTGSRQFERDLRRFARHERKMLLDNHALYDKTKKIFLPAKTEEDIFAHLGLDYIPPWQRNA

SEQ ID NO: 160 - protein, 494 aa, Artificial Sequence
  Modified TdT Sequences
MLHIPIFPPIKKRQKLPESRNSCKYEVKFSEVAIFLVERKMGSSRRKFLTNLARSKGFRIEDVLSDAVTHVVAEDNSADELWQWLQNSSLGDLSKIAVLDISWFTECMGAGKPVQIEARHCLVKSCPVIDQYLEPSTVETVSQYACQRRTTMENHNQIFTDAFAILAENAEFNESEGPCLAFRRAASLLKSLPHAISSSKDLEGLPCLGDQSKAVIEDILEYGQCSKVQDVLCDDRYQTIKLFTSVFGVGLKTAEKWYRKGFHSLEEVQADNAIHFTKMQKAGFLYYDDISAAVCKAEADAIGQIVEETVRLIAPDAIVTLTGGFRRGKECGHDVDFLITTPEMGKEVWLLNRLINRLQNQGILLYYDIVESTFDKTRLPCRKFEAMDHFQKCFAIIKLKKELAAGRVQKDWKAIRVDFVAPPVDNFAFALLGWTGSRQFERDLRRFARHERKMLLDNHALYDKTKKIFLPAKTEEDIFAHLGLDYIPPWQRNA

SEQ ID NO: 161 - protein, 494 aa, Artificial Sequence
  Modified TdT Sequences
MLHIPIFPPIKKRQKLPESRNSCKYEVKFSEVAIFLVERKMGSSRRKFLTNLARSKGFRIEDVLSDAVTHVVAEDNSADELWQWLQNSSLGDLSKIEVLDISWFTECMEAGKPVQVEARHCLVKRCPVIDQYLEPSTVETVSQYACQRRTTMENHNQIFTDAFAILAENAEFNESEGPCLAFRRAASLLKSLPHAISSSKDLEGLPCLGDQTKAVIEDILEYGQCSKVQDVLCDDRYQTIKLFTSVFGVGLKTAEKWYRKGFHSLEEVQADNAIHFTKMQKAGFLYYDDISAAVCKAEAQAIGQIVEETVRLIAPDAIVTLTGGFRRGKECGHDVDFLITTPEMGKEVWLLNRLINRLQNQGILLYYDIVESTFDKTRLPCRKFEAMDHFQKCFAIIKLKKELAAGRVQKDWKAIRVDFVMPPVDNFAFALLGWTGSRQFERDLRRFARHERKMLLDNHALYDKTKKIFLPAKTEEDIFAHLGLDYIPPWQRNA

SEQ ID NO: 162 - protein, 494 aa, Artificial Sequence
  Modified TdT Sequences
MLHIPIFPPIKKRQKLPESRNSCKYEVKFSEVAIFLVERKMGSSRRKFLTNLARSKGFRIEDVLSDAVTHIVAEDNSADELWQWLQNSSLGDLSKIAVLDISWFTECMGAGKPVQVEARHCLVKSCPVIDQYLEPSTVETVSQYACQRRTTMENHNQIFTDAFAILAENAEFNESEGPCLAFRRAASLLKSLPHAISSSKDLEGLPCLGDQTKAVIEDILEYGQCSKVQDVLCDDRYQTIKLFTSVFGVGLKTAEKWYRKGFHSLEEVQADNAIHFTKMQKAGFLYYDDISAAVCKAEAQAIGQIVEETVRLIAPDAIVTLTGGFRRGKECGHDVDFLITTPEMGKEVWLLNRLINRLQNQGILLYYDIVESTFDKTRLPCRKFEAMDHFQKCFAIIKLKKELAAGRVQKDWKAIRVDFVAPPVDNFAFALLGWTGSRQFERDLRRFARHERKMLLDNHALYDKTKKIFLPAKTEEDIFAHLGLDYIDPWQRNA

SEQ ID NO: 163 - protein, 494 aa, Artificial Sequence
  Modified TdT Sequences
MLHIPIFPPIKKRQKLPESRNSCKYEVKFSEVAIFLVERKMGSSRRKFLTNLARSKGFRIEDVLSDAVTHVVAEDNSADELWQWLQNSSLGDLSKIEVLDISWFTECMEAGKPVQVEARHCLVKSCPVIDQYLEPSTVETVSQYACQRRTTMENHNQIFTDAFAILAENAEFNESEGPCLAFRRAASLLKSLPHAISSSRDLEGLPCLGDQTKAVIEDILEYGQCSKVQDVLCDDRYQTIKLFTSVFGVGLKTAEKWYRKGFHSLEEVQADKAIHFTKMQKAGFLYYDDISAAVCKAEADAIGQIVEETVRLIAPDAIVTLTGGFRRGKECGHDVDFLITTPEMGKEVWLLNRLINRLQNQGILLYYDIVESTFDKTRLPCRKFEAMDHFQKCFAIIKLKKELAAGRVQKDWKAIRVDFVMAPVDNFAFALLGWTGSKQFERDLRRFARHERKMLLDNHALYDKTKKIFLPAKTEEDIFAHLGLDYIPPWQRNA

SEQ ID NO: 164 - protein, 494 aa, Artificial Sequence
  Modified TdT Sequences
MLHIPIFPPIKKRQKLPESRNSCKYEVKFSEVAIFLVERKMGSSRRAFLTNLARSKGFRIEDVLSDAVTHVVAEDNSADELWQWLQNSSLGDLSKIEVLDISWFTECMGAGKPVEVEARHCLVKSCPVIDQYLEPSTVETVSQYACQRRTTMENHNQIFTDAFAILAENAEFNESEGPCLAFRRAASLLKSLPHAISSSKDLEGLPCLGDQTKAVIEDILEYGQCSKVQDVLCDDRYQTIKLFTSVFGVGLKTAEKWYRKGFHSLEEVKADKAIHFTKMQKAGFLYYDDISAAVCKAEADAIGQIVEETVRLIAPDAIVTLTGGFRRGKECGHDVDFLITTPEMGKEVWLLNRLINRLQNQGILLYYDIVESTFDKTRLPCRKFEAMDHFQKCFAIIKLKKELAAGRVQKDWKAIRVDFVAPPVDNFAFALLGWTGSRQFERDLRRFARHERKMLLDNHALYDKTKKIFLPAKTEEDIFAHLGLDYIPPWQRNA

SEQ ID NO: 165 - protein, 494 aa, Artificial Sequence
  Modified TdT Sequences
MLHIPIFPPIKKRQKLPESRNSCKYEVKFSEVAIFLVERKMGSSRRKFLTNLARSKGFRIEDVLSDAVTHVVAEDNSADELWQWLQNSSLGDLSKIEVLDISWFTECMEAGKPVQVEARHCLVKSCPVIDQYLEPSTVETVSQYACQRRTTMENHNQIFTDAFAILAENAEFNESEGPCLAFRRAASLLKSLPHAISSSKDLEGLPCLGDQSKAVIEDILEYGQCSKVQDVLCDDRYQTIKLFTSVFGVGLKTAEKWYRKGFHTLEEVQADNAIHFTKMQKAGFLYYDDISAAVCKAEADAIGQIVEETVRLIAPDAIVTLTGGFRRGKECGHDVDFLITTPEMGKEVWLLNRLINRLQNQGILLYYDIVESTFDKTRLPCRKFEAMDHFQKCFAIIKLKKELAAGRVQKDWKAIRVDFVAPPVDNFAFALLGWTGSRQFERDLRRFARHERKMLLDNHALYDKTKKIFLPAKTEEDIFAHLGLDYIPPWQRNA

SEQ ID NO: 166 - protein, 494 aa, Artificial Sequence
  Modified TdT Sequences
MLHIPIFPPIKKRQKLPESRNSCKYEVKFSEVAIFLVERKMGSSRRKFLTNLARSKGFRIEDVLSDAVTHVVAEDNSADELWQWLQNSSLGDLSKIEVLDISWFTECMGAGKPVQVEARHCLVKSCPVIDQYLEPSTVETVSQYACQRRTTMENHNKIFTDAFAILAENAEFNESEGPCLAFRRAASLLKSLPHAISSSKDLEGLPCLGDQTKAVIEDILEYGQCSKVQDVLCDDRYQTIKLFTSVFGVGLKTAEKWYRKGFHSLEEVKADNAIHFTKMQKAGFLYYDDISAAVCKAEADAIGQIVEEAVRLIAPDAIVTLTGGFRRGKECGHDVDFLITTPEMGKEVWLLNRLINRLQNQGILLYYDIVESTFDKTRLPCRKFEAMDHFQKCFAIIKLKKELAAGRVQKDWKAIRVDFVAPPVDNFAFALLGWTGSRQFERDLRRFARHERKMLLDNHALYDKTKKIFLPAKTEEDIFAHLGLDYIPPWQRNA

SEQ ID NO: 167 - protein, 494 aa, Artificial Sequence
  Modified TdT Sequences
MLHIPIFPPIKKRQKLPESRNSCKYEVKFSEVAIFLVERKMGSSRRKFLTNLGRSKGFRIEDVLSDAVTHVVAEDNSADELWQWLQNSSLGDLSKIEVLDISWFTECMGAGKPVQVEARHCLVKSCPVIDQYLEPSTVETVSQYACQRRTTMENHNQIFTDAFAILAENAEFNESEGPCLAFRRAASLLKSLPHAISSSKDLEGLPCLGDQSKAVIEDILEYGQCSKVQDVLCDDRYQTIKLFTSVFGVGLKTAEKWYRKGFHSLEEVQADNAIHFTKMQKAGFLYYDDINAAVCKAEADAIGQIVEETVRLIAPDAIVTLTGGFRRGKECGHDVDFLITTPEMGKEVWLLNRLINRLQNQGILLYYDIVESTFDKTRLPCRKFEAMDHFQKCFAIIKLKKELAAGRVQKDWKAIRVDFVAPPVDNFAFALLGWTGSRQFERDLRRFARHERKMLLDNHALYDKTKKIFLPAKTEEDIFAHLGLDYIPPWQRNA

SEQ ID NO: 168 - protein, 494 aa, Artificial Sequence
  Modified TdT Sequences
MLHIPIFPPIKKRQKLPESRNSCKYEVKFSEVAIFLVERKMGSSRRKFLTNLARSKGFRIENVLSDAVTHVVAEDNSADELWQWLQNSSLGDLSKIEVLDISWFTECMEAGKPVQVEARHCLVKSCPVIDQYLEPSAVETVSQYACQRRTTMENHNQIFTDAFAILAENAEFNESEGPCLAFRRAASLLKSLPHAISSSKDLEGLPCLGDQTKAVIEDILEYGQCSKVQDVLCDDRYQTIKLFTSVFGVGLKTAEKWYRKGFHSLEEVQADKAIHFTKMQKAGFLYYDDISAAVCKAEADAIGQIVEETVRLIAPDAIVTLTGGFRRGKECGHDVDFLITTPEMGKEVWLLNRLINRLQNQGILLYYDIVESTFDKTRLPCRKFEAMDHFQKCFAIIKLKKELAAGRVQKDWKAIRVDFVACPVDNFAFALLGWTGSRQFERDLRRFARHERKMLLDNHALYDKTKKIFLPAKTEEDIFAHLGLDYIPPWQRNA

SEQ ID NO: 169 - protein, 494 aa, Artificial Sequence
  Modified TdT Sequences
MLHIPIFPPIKKRQKLPESRNSCKYEVKFREVAIFLVERKMGSSRRKFLTNLARSKGFRIEDVLSDAVTHVVAEQNSADELWQWLQNSSLGDLSKIEVLDISWFTECMGAGKPVEVEARHCLVKSCPVIDQYLEPSTVETVSQYACQRRTTMENHNQIFTDAFAILAENAEFNESEGPCLAFRRAASLLKSLPHAISSSKDLEGLPCLGDQTKAVIEDILEYGQCSKVQDVLCDDRYQTIKLFTSVFGVGLKTAEKWYRKGFHSLEEVQADNAIHFTKMQKAGFLYYDDISAAVCKAEADAIGQIVEEAVRLIAPDAIVTLTGGFRRGKECGHDVDFLITTPEMGKEVWLLNRLINRLQNQGILLYYDIVESTFDKTRLPCRKFEAMDHFQKCFAIIKLKKELAAGRVQKDWKAIRVDFVAPPVDNFAFALLGWTGSRQFERDLRRFARHERKMLLDNHALYDKTKKIFLPAKTEEDIFAHLGLDYIPPWQRNA

SEQ ID NO: 170 - protein, 494 aa, Artificial Sequence
  Modified TdT Sequences
MLHIPIFPPIKKRQKLPESRNSCKYEVKFSEVAIFLVERKMGSSRRKFLTNLARSKGFRIEDVLSDAVTHVVAEDNSADELWQWLQNSSLGDLSKIEVLDISWFTECMGAGRPVQVEARHCLVKSCPVIDQYLEPSTVETVSQYACQRRTTMENHNKIFTDAFAILAENAEFNESEGPCLAFRRAASLLKSLPHAISSSKDLEGLPCLGDQTKAVIEDILEYGQCSKVQDVLCDDRYQTIKLFTSVFGVGLKTAEKWYRKGFHSLEEVQADNAIHFTKMQKAGFLYYDDISAAVCKAEADAIGQIVEETVRLIAPDAIVTLTGGFRRGKECGHDVDFLITTPEMGKEVWLLNRLINRLQNQGILLYYDIVESTFDKTRLPCRKFEAMDHFQKCFAIIKLKKELAAGRVQKDWKAIRVDFVACPVDNFAFALLGWTGSRQFERDLRRFARHERKMLLDNHALYDKTKKIFLPAKTEEDIFAHLGLDYIPPWQRNA

SEQ ID NO: 171 - protein, 494 aa, Artificial Sequence
  Modified TdT Sequences
MLHIPIFPPIKKRQKLPESRNSCKYEVKFSEVAIFLVERKMGSSRRKFLTNLARSKGFRIEDVLSDAVTHVVAEDNSADELWQWLQNSSLGDLSKIEVLDISWFTECMEAGKPVQIEARHCLVKSCPVIDQYLEPSTVETVSQYACQRRTTMENHNQIFTDAFAILAENAEFNESEGPCLEFRRAASLLKSLPHAISSSKDLEGLPCLGDQTKAVIEDILEYGQCSKVQDVLCDDRYQTIKLFTSVFGVGLKTAEKWYRKGFHSLEEVQADKAIHFTKMQKAGFLYYDDISAAVCKAEADAIGQIVEETVRLIAPDAIVTLTGGFRRGKECGHDVDFLITTPEMGKEVWLLNRLINRLQNQGILLYYDIVESTFDKTRLPCRKFEAMDHFQKCFAIIKLKKELAAGRVQKDWKAIRVDFVACPVDNFAFALLGWTGSRQFERDLRRFARHERKMLLDNHALYDKTKKIFLPAKTEEDIFAHLGLDYIPPWQRNA

SEQ ID NO: 172 - protein, 494 aa, Artificial Sequence
  Modified TdT Sequences
MLHIPIFPPIKKRQKLPESRNSCKYEVKFSEVAIFLVERKMGSSRRKFLTNLARSKGFRIEDVLSDAVTHVVAEDNSADELWQWLQNSSLGDLSKIEVLDISWFTECMGAGKPVQVEARHCLVKSCPVIDQYLEPSTVETVSQYACQRRTTMENHNQIFTDAFAILAENAEFNESEGPCLAFRRAASLLKSLPHAISSSKDLEGLPCLGDQTKRVIEDILEYGQCSKVQDVLCDDRYQTIKLFTSVFGVGLKTAEKWYRKGLHTLEEVQADNAIHFTKMQKAGFLYYDDISAAVCKAEADAIGQIVEETVRLIAPDAIVTLTGGFRRGKECGHDVDFLITTPEMGKEVWLLNRLINRLQNQGILLYYDIVESTFDKTRLPCRKFEAMDHFQKCFAIIKLKKELAAGRVQKDWKAIRVDFVAPPVDNFAFALLGWTGSRQFERDLRRFARHERKMLLDNHALYDKTKKIFLPAKTEEDIFAHLGLDYIPPWQRNA

SEQ ID NO: 173 - protein, 494 aa, Artificial Sequence
  Modified TdT Sequences
MLHIPIFPPIKKRQKLPESRNSCKYEVKFSEVAIFLVERKMGSSRRKFLTNLARSKGFRIEDVLSDAVTHVVAEDNSADELWQWLQNSSLGDLSKIEVLDISWFTECMEAGKPVQVEARHCLVKSCPVIDQYLEPSTVETVSQYACQRRTTMENHNRIFTDAFAILAENAEFNESEGPCLAFRRAASLLKSLPHAISSSKDLEGLPCLGDQTKAVIEDILEYGQCSKVQDVLCDDRYQTIKLFTSVFGVGLKTAEKWYRKGFHSLEEVQADKAIHFTKMQKAGFLYYDDISAAVCKAEADAIGQIVEETVRLIAPDAIVTLTGGFRRGKECGHDVDFLITTPEMGKEVWLLNRLINRLQNQGILLYYDIVESTFDKTRLPCRKFEAMDHFQKCFAIIKLKKELAAGRVQKDWKAIRVDFVACPVDNFAFALLGWTGSKQFERDLRRFARHERKMLLDNHALYDKTKKIFLPAKTEEDIFAHLGLDYIPPWQRNA

SEQ ID NO: 174 - protein, 354 aa, Artificial Sequence
  Modified TdT Sequences
TVSQYACQRRTTMENHNQIFTDAFAILAENAEFNESEDPCLAFRRAASLLKSLPHAISSSKDLEGLPCLGDQTKAVIEDILEYGQCSKVQDVLCDDRYQTIKLFTSVFGVGLKTAEKWYRKGFHSLEEVQADKAIHFTKMQKAGFLYYDDISAAVCKAEADAIGQIVEETVRLIAPDAIVTLTGGFRRGKECGHDVDFLITTPEMGKEQLLPKVINLWEKKGLLLYYDLVESTFDKTRLPCRKFEAMDHFQKCFAIIKLKKELAAGRVQKDWKAIRVDFVMPPVDNFAFALLGWTGSRQFERDLRRFARHERKMLLDNHALYDKTKKIFLPAKTEEDIFAHLGLDYIPPWQRNA

SEQ ID NO: 175 - protein, 354 aa, Artificial Sequence
  Modified TdT Sequences
TVSQYACQRRTTMENHNQIFTDAFAILAENAEFNESEGPCLAFRRAASLLKSLPHAISSSKDLEGLPCLGDQTKAVIEDILEYGQCSKVQDVLCDDRYQTIKLFTSVFGVGLKTAEKWYRKGFHSLEEVQADNAIHFTKMQKAGFLYYDDISAAVCKAEAQAIGQIVEETVRLIAPDAIVTLTGGFRRGKECGHDVDFLITTPEMGKEQLLPKVINLWEKKGLLLYYDLVESTFDKTRLPCRKFEAMDHFQKCFAIIKLKKELAAGRVQKDWKAIRVDFVAPPVDNFAFALLGWTGSRQFERDLRRWARHERKMLLDNHALYDKTKKIFLPAKTEEDIFAHLGLDYIPPWQRNA

SEQ ID NO: 176 - protein, 354 aa, Artificial Sequence
  Modified TdT Sequences
TVSQYACQRRTTMENHNQIFTDAFAILAENAEFNESEGPCLAFRRAASLLKSLPHAISSSKDLEGLPCLGDQTKAVIEDILEYGQCSKVQDVLCDDRYQTIKLFTSVFGVGLKTAEKWYRKGFHTLEEVQADNAIHFTKMQKAGFLYYDDISAAVCKAEADAIGQIVEETVRLIAPDAIVTLTGGFRRGKECGHDVDFLITTPEMGKEQLLPKVINLWEKKGLLLYYDLVESTFDKTRLPCRKFEAMDHFQKCFAIIKLKKELAAGRVQKDWKAIRVDFVVCPVDNFAFALLGWTGSRQFERDLRRFARHERKMLLDNHALYDKTKKIFLPAKTEEDIFAHLGLDYIPPWQRNA

SEQ ID NO: 177 - protein, 354 aa, Artificial Sequence
  Modified TdT Sequences
TVSPYACQRRTTMENHNQIFTDAFAILAENAEFNESEGPCLAFRRAASLLKSLPHAISSSKDLEGLPCLGDQTKAVIEDILEYGQCSKVQDVLCDDRYQTIKLFTSVFGVGLKTAEKWYRKGFHSLEEVQADKAIHFTKMQRAGFLYYDDISAAVCKAEADAIGQIVEETVRLIAPDAIVTLTGGFRRGKECGHDVDFLITTPEMGKEQLLPKVINLWEKKGLLLYYDLVESTFDKTRLPCRKFEAMDHFQKCFAIIKLKKELAAGRVQKDWKAIRVDFVMPPVDNFAFALLGWTGSRQFERDLRRFARHERKMLLDNHALYDKTKKIFLPAKTEEDIFAHLGLDYIPPWQRNA

SEQ ID NO: 178 - protein, 354 aa, Artificial Sequence
  Modified TdT Sequences
TVSQYACQRRTTMENHNQIFTDAFAILAENAEFNESEGPCLAFRRAASLLKSLPHAISSSKDLEGLPCLGDQTKAVIQDILEYGQCSKVQDVLCDDRYQTIKLFTSVFGVGLKTAEKWYRKGFHSLEEVQADNSIHFTKMQKAGFLYYDDISAAVCKAEADAIGQIVEETVRLIAPDAIVTLTGGFRRGKECGHDVDFLITTPEMGKEQLLPKVINLWEKKGLLLYYDLVESTFDKTRLPCRKFEAMDHFQKCFAIIKLKKELAAGRVQKDWKAIRVDFVAPPVDNFAFALLGWTGSRQFERDLRRFARHERKMILDNHALYDKTKKIFLPAKTEEDIFAHLGLDYIPPWQRNA

SEQ ID NO: 179 - protein, 354 aa, Artificial Sequence
  Modified TdT Sequences
TVSQYACQRRTTMENHNQIFTDAFAILAENAEFNESEGPCLAFRRAASLLKSLPHAISSSKDLEGLPCLGDQTKAVIEDILEYGQCSKVQDVLCDDRYQTIKLFTSVFGVGLKTAEKWYRKGFHSLEEVQADNAIHFTKMQKAGFLYYDDISAAVCKAEADAIGQIVEETVRLIAPDAIVTLTGGFRRGKECGHDVDFLITTPEMGKEQLLPKVINLWEKKGLLLYYDLVESTFDKTRLPCRKFEAMDHFQKCFAIIKLKKELAAGRVQKDWKAIRVDFVAPPVDNFAFALLGWTGSRQFERDLRRFARHEKKMLLDNHALYDKTKKIFLPAKTEEDIFAHLGLDYIPPWQRNA

SEQ ID NO: 180 - protein, 354 aa, Artificial Sequence
  Modified TdT Sequences
TVSQYACQRRTTMENHNQIFTDAFAILAENAEFNESEGPCLAFRRAASLLKSLPHAISSSKDLEGLPCLGDQTKAVIEDILEYGQCSKVQDVLCDDRYQTIKLFTSVFGVGLKTAEKWYRKGFHSLEEVQADKAIHFTKMQKAGFLYYDDISAAVCKAEADAIGQIVEETVRLIAPDAIVTLTGGFRRGKECGHDVDFLITTPEMGKEQLLPKVINLWEKKGLLLYYDLVESTFDKTRLPCRKFEAMDHFQKCFAIIKLKKELAAGRVQKNWKAIRVDFVMCPVDNFAFALLGWTGSRQFERDLRRFARHERKMLLDNHALYDKTKKIFLPAKTEEDIFAHLGLDYIPPWQRNA

SEQ ID NO: 181 - protein, 354 aa, Artificial Sequence
  Modified TdT Sequences
TVSQYACQRRTTMENHNQIFTDAFAILAENAEFNESEGPCLAFRRAASLLKSLPHAISSSKDLEGLPCLGDQTKAVIEDILEYGQCSKVQDVLCDDRYQTIKLFTSVFGVGLKTAEKWYRKGFHSLEEVQADNTIHFTKMQKAGFLYYDDISAAVCKAEAQAIGQIVEETVRLIAPDAIVTLTGGFRRGKECGHDVDFLITTPEMGKEQLLPKVINLWEKKGLLLYYDLVESTFDKTRLPCRKFEAMDHFQKCFAIIKLKKELAAGRVQKDWKAIRVDFVAPPVDNFAFALLGWTGSRQFERDLRRFARHERKMLLDNHALYDKTKKIFLPAKTEEDIFAHLGLDYIPPWQRNA

SEQ ID NO: 182 - protein, 354 aa, Artificial Sequence
  Modified TdT Sequences
TVSQYACQRRTTMENHNQIFTDAFAILAENAEFNESEGPCLAFRRAASLLKSLPHAISSSKDLEGLPCLGDQTKAVIEDILEYGQCSKVQDVLCDDRYQTIKLFTSVFGVGLKTAEKWYRKGFHSLEEVQADKAIHFTKMQKAGFLYYDDISAAVCKAEAQAIGQIVEETVRLIAPDAIVTLTGGFRRGKNCGHDVDFLITTPEMGKEQLLPKVINLWEKKGLLLYYDLVESTFDKTRLPCRKFEAMDHFQKCFAIIKLKKELAAGRVQKDWKAIRVDFVMPPVDNFAFALLGWTGSRQFERDLRRFARHERKMLLDNHALYDKTKKIFLPAKTEEDIFAHLGLDYIPPWQRNA

SEQ ID NO: 183 - protein, 354 aa, Artificial Sequence
  Modified TdT Sequences
TVSQYACQRRTTMENHNKIFTDAFAILAENAEFNESEGPCLAFRRAASLLKSLPHAISSSKDLEGLPCLGDQTKAVIEDILEYGQCSKVQDVLCDDRYQTIKLFTSVFGVGLKTAEKWYRKGLHSLEEVQADNTIHFTKMQKAGFLYYDDISAAVCKAEADAIGQIVEETVRLIAPDAIVTLTGGFRRGKECGHDVDFLITTPEMGKEQLLPKVINLWEKKGLLLYYDLVESTFDKTRLPCRKFEAMDHFQKCFAIIKLKKELAAGRVQKDWKAIRVDFVAPPVDNFAFALLGWTGSRQFERDLRRFARHERKMLLDNHALYDKTKKIFLPAKTEEDIFAHLGLDYIPPWQRNA

SEQ ID NO: 184 - protein, 354 aa, Artificial Sequence
  Modified TdT Sequences
TVSQYACQRRTTMENHNQIFTDAFAILAENAEFNESEGPCLAFRRAASLLKSLPHAISSSKDLEGLPCLGDQTKAVIEDILEYGQCSKVQDVLCDDRYQTIKLFTSVFGVGLKTAEKWYRKGFHSLEEVQADKAIHFTKMQRAGFLYYDDISAAVCKAEADAIGQIVEETVRLIAPDAIVTLTGGFRRGKECGHDVDFLITTPEMGKEQLLPKVINLWEKKGLLLYYDLVESTFDKTRLPCRKFEAMDHFQKCFAIIKLKKELAAGRVQKDWKAIRVDFVMPPVDNFAFALLGWTGSRQFERDLRRFARHERKMLLDNHALYDKTKKIFLPAKTEEDIFAHLGLDYIPPWQRNA

SEQ ID NO: 185 - protein, 354 aa, Artificial Sequence
  Modified TdT Sequences
TVSQYACQRRTTMEHHNQIFTDAFAILAENAEFNESEGPCLAFRRAASLLKSLPHAISSSKDLEGLPCLGDQTKAVIEDILEYGQCSKVQDVLCDDRYQTIKLFTSVFGVGLKTAEKWYRKGFHSLEEVQADNAIHFTKMQKAGFLYYDDISAAVCKAEADAIGQIVEETVRLIAPDAIVTLTGGFRRGKECGHDVDFLITSPEMGKEQLLPKVINLWEKKGLLLYYDLVESTFDKTRLPCRKFEAMDHFQKCFAIIKLKKELAAGRVQKDWKAIRVDFVAPPVDNFAFALLGWTGSRQFERDLRRFARHERKMLLDNHALYDKTKKIFLPAKTEEDIFAHLGLDYIPPWQRNA

SEQ ID NO: 186 - protein, 354 aa, Artificial Sequence
  Modified TdT Sequences
TVSQYACQRRTTMENHNQIFTDAFAVLAENAEFNESEGPCLAFRRAASLLKSLPHAISSSKDLEGLPCLGDQTKAVIQDILEYGQCSKVQDVLCDDRYQTIKLFTSVFGVGLKTAEKWYRKGFHSLEEVQADNAIHFTKMQKAGFLYYDDISAAVCKAEADAIGQIVEETVRLIAPDAIVTLTGGFRRGKECGHDVDFLITTPEMGKEQLLPKVINLWEKKGLLLYYDLVESTFDKTRLPCRKFEAMDHFQKCFAIIKLKKELAAGRVQKDWKAIRVDFVAPPVDNFAFALLGWTGSRQFERDLRRFARHERKMLLDNHALYDKTKKIFLPAKTEEDIFAHLGLDYIDPWQRNA

SEQ ID NO: 187 - protein, 354 aa, Artificial Sequence
  Modified TdT Sequences
TVSQYACQRRTTMENHNQIFTDAFAILAENAEFNESEGPCLAFRRAASLLKSLPHAISSSKDLEGLPCLGDQTKAVIEDILEYGQCSKVQDVLCDDRYQTIKLFTSVFGVGLKTAEKWYRKGFHSLEEVQADNAIHFTKMQKAGFLYYDDISAAVCKAEADAIGQIVEETVRLIAPDAIVTLTGGFRRGKECGHDVDFLITTPEMGKEQLLPKVINLWEKKGLLLYYDLVESTFDKTRLPCRKFEAMDHFQKCFAIIKLKKELAAGRVQKDWKAIRVDFVVPPVDNFAFALLGWTGSRQFERDLRRFARHERKMILDNHALYDKTKKIFLPAKTEEDIFAHLGLDYIPPWQRNA

SEQ ID NO: 188 - protein, 354 aa, Artificial Sequence
  Modified TdT Sequences
TVSQYACQRRTTMENCNQIFTDAFAILAENAEFNESEGPCLAFRRAASLLKSLPHAISSSKDLEGLPCLGDQTKAVIEDILEYGQCSKVQDVLCDDRYQTIKLFTSVFGVGLKTAEKWYRKGFHSLEEVQADKAIHFTKMQKAGFLYYDDISAAVCKAEADAIGQIVEETVRLIAPDAIVTLTGGFRRGKECGHDVDFLITTPEMGKEQLLPKVINLWEKKGLLLYYDLVESTFDKTRLPCRKFEAMDHFQKCFAIIKLKKELAAGRVQKNWKAIRVDFVMPPVDNFAFALLGWTGSRQFERDLRRFARHERKMLLDNHALYDKTKKIFLPAKTEEDIFAHLGLDYIPPWQRNA

SEQ ID NO: 189 - protein, 354 aa, Artificial Sequence
  Modified TdT Sequences
TVSQYACQRRTTMENHNQIFTDAFAILAENAEFNESEGPCLAFRRAASLLKSLPHAISSSKDLEGLPCLGDQTKAVIEDILEYGQCSKVQDVLCDDRYQTIKLFTSVFGVGLKTAEKWYRKGFHSLEEVQADKAIHFTKMQKAGFLYYDDISAAVCRAEADAIGQIVEETVRLIAPDAIVTLTGGFRRGKECGHDVDFLITTPEMGKEQLLPKVINLWEKKGLLLYYDLVESTFDKTRLPCRKFEAMDHFQKCFAIIKLKKERAAGRVQKDWKAIRVDFVMPPVDNFAFALLGWTGSRQFERDLRRFARHERKMLLDNHALYDKTKKIFLPAKTEEDIFAHLGLDYIPPWQRNA

SEQ ID NO: 190 - protein, 354 aa, Artificial Sequence
  Modified TdT Sequences
TVSQYACQRRTTMENHNQIFTDAFAILAENAEFNESEGPCLAFRRAASLLKSLPHAISSSKDLEGLPCLGDQTKAVIEDILEYGQCSKVQDVLCDDRYQTIKLFTSVFGVGLKTAEKWYRKGFHSLEEVQADKAIHFTKMQKAGFLYYDDISAAVCKAEADAIGQIVEETVRLIAPDAIVTLTGGFRRGKECGHDVDFLITTPEMGKEQLLPKVINLWEKKGLLLYYDLVESTFDKTRLPCRKFEAMDHFQKCFAIIKLKKELAAGRVQKDWKAIRVDFVMPPVDNFAFALLGWTGSRQFERDLRRFARHERKMLLDNHALYDKTKKIFLPAKTEEDIFAHLGLDYIPPWQRNA

SEQ ID NO: 191 - protein, 354 aa, Artificial Sequence
  Modified TdT Sequences
TVSQYACQRRTTMENHNKIFTDAFAILAENAEFNESEGPCLAFRRAASLLKSLPHAISSSKDLEGLPCLGDQTKAVIEDILEYGQCSKVQDVLCDDRYQTIKLFTSVFGVGLKTAEKWYRKGFHSLEEVQADNAIHFTKMQKAGFLYYDDISAAVCKAEADAIGQIVEETVRLIAPDAIVTLTGGFRRGKECGHDVDFLITTPEMGKEQLLPKVINLWEKKGLLLYYDLVESTFDKTRLPCRKFEAMDHFQKCFAIIKLKKELAAGRVQKDWKAIRVDFVAAPVDNFAFALLGWTGSRQFERDLRRFARHERKMLLDNHALYDKTKKIFLPAKTEEDIFAHLGLDYIPPWQRNA

SEQ ID NO: 192 - protein, 354 aa, Artificial Sequence
  Modified TdT Sequences
TVSQYACQRRTTMENHNQIFTDAFAILAENAEFNESEGPCLAFRRAASLLKSLPHAISSSKDLEGLPCLGDQTKAVIQDILEYGQCSKVQDVLCDDRYQTIKLFTSVFGVGLKTAEKWYRKGFHSLEEVQADNTIHFTKMQKAGFLYYDDISAAVCKAEADAIGQIVEETVRLIAPDAIVTLTGGFRRGKECGHDVDFLITTPEMGKEQLLPKVINLWEKKGLLLYYDLVESTFDKTRLPCRKFEAMDHFQKCFAIIKLKKELAAGRVQKDWKAIRVDFVAPPVDNFAFALLGWTGSRQFERDLRRFARHERKMLLDNHALYDKTKKIFLPAKTEEDIFAHLGLDYIPPWQRNA

SEQ ID NO: 193 - protein, 354 aa, Artificial Sequence
  Modified TdT Sequences
TVSQYACQRRTTMENHNQIFTDAFAILAENAEFNESEGPCLAFRRAASLLKSLPHAISSSKDLEGLPCLGDQTKAVIEDILEYGQCSKVQDVLCDDRYQTIKLFTSVFGVGLKTAEKWYRKGFHSLEEVQADKAIHFTKMQKAGFLYYDDISAAVCKAEADAIGQIVEETVRLIAPDAIVTLTGGFRRGKECGHDVDFLITTPEMGKEQLLPKVINLWEKKGLLLYYDLVESTFDKTRLPCRKFEAMDHFQKCFAIIKLKKERAAGRVQKNWKAIRVDFVMPPVDNFAFALLGWTGSRQFERDLRRFARHERKMLLDNHALYDKTKKIFLPAKTEEDIFAHLGLDYIPPWQRNA

SEQ ID NO: 194 - protein, 354 aa, Artificial Sequence
  Modified TdT Sequences
TVSQYACQRRTTMENHNQIFTDAFAILAENAEFNESEGPCLAFRRAASLLKSLPHAISSSKDLEGLPCLGDQTKAVIEDILEYGQCSKVQDVLCDDRYQTIKLFTSVFGVGLKTAEKWYRKGFHSLEEVQADKAIHFTKMQKAGFLYYDDISAAVCKAEADAIGQIVEETVRLIAPDAIVTLTGGFRRGKECGHDVDFLITTPEMGKEQLLPKVINLWEKKGLLLYYDLVESTFDKTRLPCRKFEAMDHFQKCFAIIKLKKELAAGRVQKDWKAIRVDFVMCPVDNFAFALLGWTGSRQFERDLRRFARHERKMLLDNHALYDKTKKIFLPAKTEEDIFAHLGLDYIPPWQRNA

SEQ ID NO: 195 - protein, 354 aa, Artificial Sequence
  Modified TdT Sequences
TVSQYACQRRTTMENHNQIFTDAFAILAENAEFNESEGPCLAFRRAASLLKSLPHAISSSKDLEGLPCLGDQTKAVIEDILEYGQCSKVQDVLCDDRYQTIKLFTSVFGVGLKTAEKWYRKGFHSLEEVKADNAIHFTKMQKAGFLYYDDISAAVCKAEADAIGQIVEETVRLIAPDAIVTLTGGFRRGKECGHDVDFLITTPEMGKEQLLPKVINLWEKKGLLLYYDLVESTFDKTRLPCRKFEAMDHFQKCFAIIKLKKELAAGRVQKDWKAIRVDFVVPPVDNFAFALLGWTGSRQFERDLRRFARHERKMLLDNHALYDKTKKIFLPAKTEEDIFAHLGLDYIPPWQRNA

SEQ ID NO: 196 - protein, 354 aa, Artificial Sequence
  Modified TdT Sequences
TVSQYACQRRTTMEHHNQIFTDAFAILAENAEFNESEGPCLAFRRAASLLKSLPHAISSSKDLEGLPCLGDQTKRVIEDILEYGQCSKVQDVLCDDRYQTIKLFTSVFGVGLKTAEKWYRKGFHSLEEVQADNAIHFTKMQKAGFLYYDDISAAVCKAEADAIGQIVEETVRLIAPDAIVTLTGGFRRGKECGHDVDFLITTPEMGKEQLLPKVINLWEKKGLLLYYDLVESTFDKTRLPCRKFEAMDHFQKCFAIIKLKKELAAGRVQKDWKAIRVDFVAPPVDNFAFALLGWTGSRQFERDLRRFARHERKMLLDNHALYDKTKKIFLPAKTEEDIFAHLGLDYIPPWQRNA

SEQ ID NO: 197 - protein, 354 aa, Artificial Sequence
  Modified TdT Sequences
TVSQYACQRRTTMENHNQIFTDAFAILAENAEFNESEDPCLAFRRAASLLKSLPHAISSSKDLEGLPCLGDQTKAVIEDILEYGQCSKVQDVLCDDRYQTIKLFTSVFGVGLKTAEKWYRKGFHSLEEVQADKAIHFTKMQRAGFLYYDDISAAVCKAEADAIGQIVEETVRLIAPDAIVTLTGGFRRGKECGHDVDFLITTPEMGKEQLLPKVINLWEKKGLLLYYDLVESTFDKTRLPCRKFEAMDHFQKCFAIIKLKKELAAGRVQKDWKAIRVDFVACPVDNFAFALLGWTGSRQFERDLRRFARHERKMLLDNHALYDKTKKIFLPAKTEEDIFAHLGLDYIPPWQRNA

SEQ ID NO: 198 - protein, 354 aa, Artificial Sequence
  Modified TdT Sequences
TVSQYACQRRTTMENHNQIFTDAFAILAENAEFNESEGPCLAFRRAASLLKSLPHAISSSKDLEGLPCLGDQTKAVIQDILEYGQCSKVQDVLCDDRYQTIKLFTSVFGVGLKTAEKWYRKGFHSLEEVKADNAIHFTKMQKAGFLYYDDISAAVCKAEADAIGQIVEETVRLIAPDAIVTLTGGFRRGKECGHDVDFLITTPEMGKEQLLPKVINLWEKKGLLLYYDLVESTFDKTRLPCRKFEAMDHFQKCFAIIKLKKELAAGRVQKDWKAIRVDFVAPPVDNFAFALLGWTGSRQFERDLRRFARHERKMLLDNHALYDKTKKIFLPAKTEEDIFAHLGLDYIPPWQRNA

SEQ ID NO: 199 - protein, 354 aa, Artificial Sequence
  Modified TdT Sequences
TVSQYACQRRTTMENHNKIFTDAFAILAENAEFNESEGPCLAFRRAASLLKSLPHAISSSKDLEGLPCLGDQTKAVIQDILEYGQCSKVQDVLCDDRYQTIKLFTSVFGVGLKTAEKWYRKGFHSLEEVQADNAIHFTKMQKAGFLYYDDISAAVCKAEADAIGQIVEETVRLIAPDAIVTLTGGFRRGKECGHDVDFLITTPEMGKEQLLPKVINLWEKKGLLLYYDLVESTFDKTRLPCRKFEAMDHFQKCFAIIKLKKELAAGRVQKDWKAIRVDFVMPPVDNFAFALLGWTGSRQFERDLRRFARHERKMLLDNHALYDKTKKIFLPAKTEEDIFAHLGLDYIPPWQRNA

SEQ ID NO: 200 - protein, 354 aa, Artificial Sequence
  Modified TdT Sequences
TVSQYACQRRTTMENHNQIFTDAFAILAENAEFNESEGPCLAFRRAASLLKSLPHAISSSKDLEGLPCLGDQTKAVIEDILEYGQCSKVQDVLCDDRYQTIKLFTSVFGVGLKTAEKWYRKGFHSLEEVQADKAIHFTKMQKAGFLYYDDISAAVCKAEADAIGQIVEETVRLIAPDAIVTLTGGFRRGKECGHDVDFLITTPEMGKEQLLPKVINLWEKKGLLLYYDLVESTFDKTRLPCRKFEAMDHFQKCFAIIKLKKELAAGRVQKDWKAIRVDFVACPVDRFAFALLGWTGSRQFERDLRRFARHERKMLLDNHALYDKTKKIFLPAKTEEDIFAHLGLDYIPPWQRNA

SEQ ID NO: 201 - protein, 354 aa, Artificial Sequence
  Modified TdT Sequences
TVSQYACQRRTTMENHNQIFTDAFAILAENAEFNESEGPCLAFRRAASLLKSLPHAISSSKDLEGLPCLGDQTKAVIEDILEYGQCSKVQDVLCDDRYQTIKLFTSVFGVGLKTAEKWYRKGFHSLEEVQADKAIHFTKMQKAGFLYYDDISAAVCKAEADAIGQIVEETVRLIAPDAIVTLTGGFRRGKECGHDVDFLITTPEMGKEQLLPKVINLWEKKGLLLYYDLVESTFDKTRLPCRKFEAMDHFQKCFAIIKLKKELAAGRVQKNWKAIRVDFVLCPVDNFAFALLGWTGSRQFERDLRRFARHERKMLLDNHALYDKTKKIFLPAKTEEDIFAHLGLDYIPPWQRNA

SEQ ID NO: 202 - protein, 354 aa, Artificial Sequence
  Modified TdT Sequences
TVSQYACQRRTTMENHNQIFTDAFAVLAENAEFNESEGPCLAFRRAASLLKSLPHPISSSKDLEGLPCLGDQTKAVIEDILEYGQCSKVQDVLCDDRYQTIKLFTSVFGVGLKTAEKWYRKGFHSLEEVQADNAIHFTKMQKAGFLYYDDISAAVCKAEADAIGQIVEETVRLIAPDAIVTLTGGFRRGKECGHDVDFLITTPEMGKEQLLPKVINLWEKKGLLLYYDLVESTFDKTRLPCRKFEAMDHFQKCFAIIKLKKELAAGRVQKDWKAIRVDFVAAPVDNFAFALLGWTGSRQFERDLRRFARHERKMLLDNHALYDKTKKIFLPAKTEEDIFAHLGLDYIPPWQRNA

SEQ ID NO: 203 - protein, 354 aa, Artificial Sequence
  Modified TdT Sequences
TVSQYACQRRTTMENHNQIFTDAFAILAENAEFNESEGPCLAFRRAASLLKSLPHAISSSKDLEGLPCLGDQTKAVIEDILEYGQCSKVQDVLCDDRYQTIKLFTSVFGVGLKTAEKWYRKGFHSLEEVQADNAIHFTKMQKAGFLYYDDINAAVCKAEADAIGQIVEETVRLIAPDAIVTLTGGFRRGKECGHDVDFLITTPQMGKEQLLPKVINLWEKKGLLLYYDLVESTFDKTRLPCRKFEAMDHFQKCFAIIKLKKELAAGRVQKDWKAIRVDFVAPPVDNFAFALLGWTGSRQFERDLRRFARHERKMLLDNHALYDKTKKIFLPAKTEEDIFAHLGLDYIPPWQRNA

SEQ ID NO: 204 - protein, 354 aa, Artificial Sequence
  Modified TdT Sequences
TVSQYACQRRTTMENHNQIFTDAFAILAENAEFNESEGPCLAFRRAASLLKSLPHAISSSKDLEGLPCLGDQTKAVIEDILEYGQCSKVQDVLCDDRYQTIKLFTSVFGVGLKTAEKWYRKGFHTLEEVQADNAIHFTKMQKAGFLYYDDISAAVCKAEADAIGQIVEEAVRLIAPDAIVTLTGGFRRGKECGHDVDFLITSPEMGKEQLLPKVINLWEKKGLLLYYDLVESTFDKTRLPCRKFEAMDHFQKCFAIIKLKKELAAGRVQKDWKAIRVDFVAPPVDNFAFALLGWTGSRQFERDLRRFARHERKMLLDNHALYDKTKKIFLPAKTEEDIFAHLGLDYIPPWQRNA

SEQ ID NO: 205 - protein, 354 aa, Artificial Sequence
  Modified TdT Sequences
TVSQYACQRRTTMENHNQIFTDAFAILAENAEFNESEDPCLAFRRAASLLKSLPHAISSSRDLEGLPCLGDQTKAVIEDILEYGQCSKVQDVLCDDRYQTIKLFTSVFGVGLKTAEKWYRKGFHSLEEVQADKAIHFTKMQKAGFLYYDDISAAVCKAEADAIGQIVEETVRLIAPDAIVTLTGGFRRGKECGHDVDFLITTPEMGKEQLLPKVINLWEKKGLLLYYDLVESTFDKTRLPCRKFEAMDHFQKCFAIIKLKKELAAGRVQKDWKAIRVDFVMPPVDNFAFALLGWTGSRQFERDLRRFARHERKMLLDNHALYDKTKKIFLPAKTEEDIFAHLGLDYIPPWQRNA

SEQ ID NO: 206 - protein, 354 aa, Artificial Sequence
  Modified TdT Sequences
TVSQYACQRRTTMEHHNQIFTDAFAILAENAEFNESEGPCLAFRRAASLLKSLPHAISSSKDLEGLPCLGDQTKAVIEDILEYGQCSKVQDVLCDDRYQTIKLFTSVFGVGLKTAEKWYRKGFHSLEEVQADNAIHFTKMQKAGFLYYDDISAAVCKAEADAIGQIVEETVRLIAPDAIVTLTGGFRRGKECGHDVDFLITTPQMGKEQLLPKVINLWEKKGLLLYYDLVESTFDKTRLPCRKFEAMDHFQKCFAIIKLKKELAAGRVQKDWKAIRVDFVAPPVDNFAFALLGWTGSRQFERDLRRFARHERKMLLDNHALYDKTKKIFLPAKTEEDIFAHLGLDYIPPWQRNA

SEQ ID NO: 207 - protein, 354 aa, Artificial Sequence
  Modified TdT Sequences
TVSQYACQRRTTMENHNQIFTDAFAILAENAEFNESEGPCLAFRRAASLLKSLPHAISSSKDLEGLPCLGDQTKAVIEDILEYGQCSKVQDVLCDDRYQTIKLFTSVFGVGLKTAEKWYRKGFHSLEEVQADKAIHFTKMQKAGFLYYDDISAAVCKAEADAIGQIVEETVRLIAPDAIVTLTGGFRRGKECGHDVDFLITTPEMRKEQLLPKVINLWEKKGLLLYYDLVESTFDKTRLPCRKFEAMDHFQKCFAIIKLKKELAAGRVQKDWKAIRVDFVAAPVDNFAFALLGWTGSRQFERDLRRFARHERKMLLDNHALYDKTKKIFLPAKTEEDIFAHLGLDYIPPWQRNA

SEQ ID NO: 208 - protein, 354 aa, Artificial Sequence
  Modified TdT Sequences
TVSQYACQRRTTMENHNQIFTDAFAILAENAEFNESEGPCVAFRRAASLLKSLPHAISSSKDLEGLPCLGDQSKAVIEDILEYGQCSKVQDVLCDDRYQTIKLFTSVFGVGLKTAEKWYRKGFHSLEEVQADKAIHFTKMQKAGFLYYDDISAAVCKAEADAIGQIVEETVRLIAPDAIVTLTGGFRRGKECGHDVDFLITTPEMGKEQLLPKVINLWEKKGLLLYYDLVESTFDKTRLPCRKFEAMDHFQKCFAIIKLKKELAARRVQKDWKAIRVDFVMPPVDNFAFALLGWTGSRQFERDLRRFARHERKMLLDNHALYDKTKKIFLPAKTEEDIFAHLGLDYIPPWQRNA

SEQ ID NO: 209 - protein, 354 aa, Artificial Sequence
  Modified TdT Sequences
TVSQYACQRRTTMENHNQIFTDAFAILAENAEFNESEGPCLAFRRAASLLKSLPHAISSSKDLEGLPCLGDQTKAVIEDILEYGQCSKVQDVLCDDRYQTIKLFTSVFGVGLKTAEKWYRKGFHSLEEVQADKAIHFTKMQKAGFLYYDDISAAVCKAEADAIGQIVEETVRLIAPDAIVTLTGGFRRGKECGHDVDFLITTPEMGKEQLLPKVINLWEKKGLLLYYDLVESTFDKTRLPCRKFEAMDHFQKCFAIIKLKKELAAGRVQKDWKAIRVDFVLAPVDNFAFALLGWTGSRQFERDLRRFARHERKMLLDNHALYDKTKKIFLPAKTEEDIFAHLGLDYIPPWQRNA

SEQ ID NO: 210 - protein, 354 aa, Artificial Sequence
  Modified TdT Sequences
TVSQYACQRRTTMENHNQIFTDAFAILAENAEFNESEGPCLEFRRAASLLKSLPHAISSSKDLEGLPCLGDQTKAVIEDILEYGQCSKVQDVLCDDRYQTIKLFTSVFGVGLKTAEKWYRKGFHSLEEVQADKAIHFTKMQKAGFLYYDDISAAVCKAEADAIGQIVEETVRLIAPDAIVTLTGGFRRGKECGHDVDFLITTPEMGKEQLLPKVINLWEKKGLLLYYDLVESTFDKTRLPCRKFEAMDHFQKCFAIIKLKKELAAGRVQKDWKAIRVDFVMPPVDNFAFALLGWTGSRQFERDLRRFARHERKMLLDNHALYDKTKKIFLPAKTEEDIFAHLGLDYIPPWQRNA

SEQ ID NO: 211 - protein, 354 aa, Artificial Sequence; identical to SEQ ID NO: 190
  Modified TdT Sequences

SEQ ID NO: 212 - protein, 354 aa, Artificial Sequence
  Modified TdT Sequences
TVSQYACQRRTTMENHNQIFTDAFAILAENAEFNESEGPCLAFRRAASLLKSLPHAISSSKDLEGLPCLGDQTKRVIEDILEYGQCSKVQDVLCDDRYQTIKLFTSVFGVGLKTAEKWYRKGFHSLEEVQADNAIHFTKMQRAGFLYYDDISAAVCKAEADAIGQIVEETVRLIAPDAIVTLTGGFRRGKECGHDVDFLITTPEMGKEQLLPKVINLWEKKGLLLYYDLVESTFDKTRLPCRKFEAMDHFQKCFAIIKLKKELAAGRVQKDWKAIRVDFVAPPVDNFAFALLGWTGSRQFERDLRRFARHERKMLLDNHALYDKTKKIFLPAKTEEDIFAHLGLDYIPPWQRNA

SEQ ID NO: 213 - protein, 354 aa, Artificial Sequence
  Modified TdT Sequences
TVSQYACQRRTTMENHNQMFTDAFAILAENAEFNESEGPCLAFRRAASLLKSLPHAISSSKDLEGLPCLGDQTKAVIEDILEYGQCSKVQDVLCDDRYQTIKLFTSVFGVGLKTAEKWYRKGFHSLEEVQADKAIHFTKMQKAGFLYYDDISAAVCKAEAQAIGQIVEETVRLIAPDAIVTLTGGFRRGKECGHDVDFLITTPEMGKEQLLPKVINLWEKKGLLLYYDLVESTFDKTRLPCRKFEAMDHFQKCFAIIKLKKELAAGRVQKDWKAIRVDFVMCPVDNFAFALLGWTGSRQFERDLRRFARHERKMLLDNHALYDKTKKIFLPAKTEEDIFAHLGLDYIPPWQRNA

SEQ ID NO: 214 - protein, 354 aa, Artificial Sequence
  Modified TdT Sequences
TVSQYACQRRTTMENHNQIFTDAFAILAENAEFNESEGPCLAFRRAASLLKSLPHAISSSKDLEGLPCLGDQTKAVIEDILEYGQCSKVQDVLCDDRYQTIKLFTSVFGVGLKTAEKWYRKGLHSLEEVQADNAIHFTKMQKAGFLYYDDISAAVCKAEADAIGQIVEETVRLIAPDAIVTLTGGFRRGKECGHDVDFLITTPEMGKEQLLPKVINLWEKKGLLLYYDLVESTFDKTRLPCRKFEAMDHFQKCFAIIKLKKELAAGRVQKDWKAIRVDFVAPPVDNFAFALLGWTGSRQFERDLRRFARHEKKMLLDNHALYDKTKKIFLPAKTEEDIFAHLGLDYIPPWQRNA

SEQ ID NO: 215 - protein, 354 aa, Artificial Sequence
  Modified TdT Sequences
TVSQYACQRRTTMENHNQIFTDAFAILAENAEFNESEGPCLAFRRAASLLKSLPHAISSSKDLEGLPCLGDQSKAVIEDILEYGQCSKVQDVLCDDRYQTIKLFTSVFGVGLKTAEKWYRKGFHSLEEVQADKAIHFTKMQKAGFLYYDDISAAVCKAEADAIGQIVEETVRLIAPDAIVTLTGGFRRGKECGHDVDFLITTPEMGKEQLLPKVINLWEKKGLLLYYDLVESTFDKTRLPCRKFEAMDHFQKCFAIIKLKKELAAGRVQKDWKAIRVDFVMPPVDNFAFALLGWTGSRQFERDLRRFARHERKMLLDNHALYDKTKKIFLPAKTEEDIFAHLGLDYIPPWQRNA

SEQ ID NO: 216 - protein, 354 aa, Artificial Sequence
  Modified TdT Sequences
TVSQYACQRRTTMENHNQIFTDAFAILAENAEFNESEGPCLAFRRAASLLKSLPHPISSSKDLEGLPCLGDQTKAVIEDILEYGQCSKVQDVLCDDRYQTIKLFTSVFGVGLKTAEKWYRKGFHSLEEVQADNAIHFTKMQKAGFLYYDDISAAVCKAEAQAIGQIVEETVRLIAPDAIVTLTGGFRRGKECGHDVDFLITTPEMGKEQLLPKVINLWEKKGLLLYYDLVESTFDKTRLPCRKFEAMDHFQKCFAIIKLKKELAAGRVQKDWKAIRVDFVAPPVDNFAFALLGWTGSRQFERDLRRFARHERKMLLDNHALYDKTKKIFLPAKTEEDIFAHLGLDYIPPWQRNA

SEQ ID NO: 217 - protein, 354 aa, Artificial Sequence; identical to SEQ ID NO: 190
  Modified TdT Sequences

SEQ ID NO: 218 - protein, 354 aa, Artificial Sequence
  Modified TdT Sequences
TVSQYACQRRTTMENHNQIFTDAFAILAENAEFNESEGPCLAFRRAASLLKSLPHAISSSKDLEGLPCLGDQTKAVIEDILEYGQCSKVQDVLCDDRYQTIKLFTSVFGVGLKTAEKWYRKGFHSLEEVQADKAIHFTKMQKAGFLYYDDISAAVCKAEADAIGQIVEETVRLIAPDAIVTLTGGFRRGKECGHDVDFLITTPEMGKEQLLPKVINLWEKKGLLLYYDLVESTFDKTRLPCRKFEAMDHFQKCFAIIKLKKELAAGRVQKDWKAIRVDFVLPPVDRFAFALLGWTGSRQFERDLRRFARHERKMLLDNHALYDKTKKIFLPAKTEEDIFAHLGLDYIPPWQRNA

SEQ ID NO: 219 - protein, 354 aa, Artificial Sequence
  Modified TdT Sequences
TVSQYACQRRTTMENHNQIFTDAFAILAENAEFNESEGPCLAFRRAASLLKSLPHAISSSKDLEGLPCLGDQTKAVIEDILEYGQCSKVQDVLCDDRYQTIKLFTSVFGVGLKTAEKWYRKGFHSLEEVQADNAIHFTKMQKAGFLYYDDISAAVCKAEADAIGQIVEETVRLIAPDAIVTLTGGFRRGKECGHDVDFLITTPEMGKEQLLPKVINLWEKKGLLLYYDLVESTFDKTRLPCRKFEAMDHFQKCFAIIKLKKELAAGRVQKDWKAIRVDFVMCPVDNFAFALLGWTGSRQFERDLRRFARHERKMLLDNHALYDKTKKIFLPAKTEEDIFAHLGLDYIPPWQRNA

SEQ ID NO: 220 - protein, 354 aa, Artificial Sequence
  Modified TdT Sequences
TVSQYACQRRTTMENHNQIFTDAFAILAENAEFNESEGPCLAFRRAASLLKSLPHAISSSKDLEGLPCLGDQTKAVIEDILEYGQCSKVQDVLCDDRYQSIKLFTSVFGVGLKTAEKWYRKGFHSLEEVQADNAIHFTKMQKAGFLYYDDISAAVCKAEAQAIGQIVEETVRLIAPDAIVTLTGGFRRGKECGHDVDFLITTPEMGKEQLLPKVINLWEKKGLLLYYDLVESTFDKTRLPCRKFEAMDHFQKCFAIIKLKKELAAGRVQKDWKAIRVDFVAPPVDNFAFALLGWTGSRQFERDLRRFARHERKMLLDNHALYDKTKKIFLPAKTEEDIFAHLGLDYIPPWQRNA

SEQ ID NO: 221 - protein, 354 aa, Artificial Sequence
  Modified TdT Sequences
TVSQYACQRRTTMENHNQIFTDAFAILAENAEFNESEGPCLAFRRAASLLKSLPHAISSSKDLEGLPCLGDQTKAVIEDILEYGQCSKVQDVLCDDRYQTIKLFTSVFGVGLKTAEKWYRKGFHSLEEVQADNAIHFTKMQKAGFLYYDDISAAVCKAEADAIGQIVEETVRLIAPDAIVTLTGGFRRGKECGHDVDFLITSPEMGKEQLLPKVINLWEKKGLLLYYDLVESTFDKTRLPCRKFEAMDHFQKCFAIIKLKKELAAGRVQKDWKAIRVDFVAPPVDNFAFALLGWTGSRQFERDLRRFARHERKMLLDNHALYDKTKKIFLPAKTEEDIFAHLGLDYIPPWQRNA

SEQ ID NO: 222 - protein, 354 aa, Artificial Sequence
  Modified TdT Sequences
TVSQYACQRRTTMENHNQIFTDAFAILAENAEFNESEGPCLAFRRAASLLKSLPHAISSSKDLEGLPCLGDQSKAVIEDILEYGQCSKVQDVLCDDRYQTIKLFTSVFGVGLKTAEKWYRKGFHSLEEVQADKAIHFTKMQKAGFLYYDDISAAVCKAEADAIGQIVEETVRLIAPDAIVTLTGGFRRGKECGHDVDFLITTPEMGKEQLLPKVINLWEKKGLLLYYDLVESTFDKTRLPCRKFEAMDHFQKCFAIIKLKKELAAGRVQKDWKAIRVDFVMCPVDNFAFALLGWTGSRQFERDLRRFARHERKMLLDNHALYDKTKKIFLPAKTEEDIFAHLGLDYIPPWQRNA

SEQ ID NO: 223 - protein, 354 aa, Artificial Sequence
  Modified TdT Sequences
TVSQYACQRRTTMENHNQIFTDAFAILAENAEFNESEGPCLAFRRAASLLKSLPHPISSSKDLEGLPCLGDQSKAVIEDILEYGQCSKVQDVLCDDRYQTIKLFTSVFGVGLKTAEKWYRKGLHSLEEVQADNAIHFTKMQKAGFLYYDDISAAVCKAEADAIGQIVEETVRLIAPDAIVTLTGGFRRGKECGHDVDFLITTPEMGKEQLLPKVINLWEKKGLLLYYDLVESTFDKTRLPCRKFEAMDHFQKCFAIIKLKKELAAGRVQKDWKAIRVDFVAPPVDNFAFALLGWTGSRQFERDLRRFARHERKMLLDNHALYDKTKKIFLPAKTEEDIFAHLGLDYIPPWQRNA

SEQ ID NO: 224 - protein, 354 aa, Artificial Sequence
  Modified TdT Sequences
TVSQYACQRRTTMENHNQIFTDAFAILAENAEFNESEGPCLAFMRAASLLKSLPHAISSSKDLEGLPCLGDQTKAVIEDILEYGQCSKVQDVLCDDRYQTIKLFTSVFGVGLKTAEKWYRKGFHSLEEVQADNAIHFTKMQKAGFLYYDDISAAVCKAEAQAIGQIVEETVRLIAPDAIVTLTGGFRRGKECGHDVDFLITTPEMGKEQLLPKVINLWEKKGLLLYYDLVESTFDKTRLPCRKFEAMDHFQKCFAIIKLKKELAAGRVQKDWKAIRVDFVAPPVDNFAFALLGWTGSRQFERDLRRFARHEKKMLLDNHALYDKTKKIFLPAKTEEDIFAHLGLDYIPPWQRNA

SEQ ID NO: 225 - protein, 354 aa, Artificial Sequence
  Modified TdT Sequences
TVSQYACQRRTTMENHNRIFTDAFAILAENAEFNESEGPCLAFRRAASLLKSLPHAISSSKDLEGLPCLGDQTKAVIEDILEYGQCSKVQDVLCDDRYQTIKLFTSVFGVGLKTAEKWYRKGFHSLEEVQADKAIHFTKMQKAGFLYYDDISAAVCKAEADAIGQIVEETVRLIAPDAIVTLTGGFRRGKECGHDVDFLITTPEMGKEQLLPKVINLWEKKGLLLYYDLVESTFDKTRLPCRKFEAMDHFQKCFAIIKLKKELAAGRVQKDWKAIRVDFVMAPVDNFAFALLGWTGSRQFERDLRRFARHERKMLLDNHALYDKTKKIFLPAKTEEDIFAHLGLDYIPPWQRNA

SEQ ID NO: 226 - protein, 354 aa, Artificial Sequence
  Modified TdT Sequences
TVSQYACQRRTTMENHNQIFTDAFAILAENAEFNESEGPCLEFRRAASLLKSLPHAISSSKDLEGLPCLGDQTKAVIEDILEYGQCSKVQDVLCDDRYQTIKLFTSVFGVGLKTAEKWYRKGFHSLEEVQADNAIHFTKMQKAGFLYYDDISAAVCKAEADAIGQIVEETVRLIAPDAIVTLTGGFRRGKECGHDVDFLITTPEMGKEQLLPKVINLWEKKGLLLYYDLVESTFDKTRLPCRKFEAMDHFQKCFAIIKLKKELAAGRVQKDWKAIRVDFVAAPVDNFAFALLGWTGSRQFERDLRRFARHERKMLLDNHALYDKTKKIFLPAKTEEDIFAHLGLDYIPPWQRNA

SEQ ID NO: 227 - protein, 354 aa, Artificial Sequence
  Modified TdT Sequences
TVSQYACQRRTTMENHNQIFTDAFAILAENAEFNESEGPCLAFRRAASLLKSLPHAISSSKDLEGLPCLGDQSKAVIEDILEYGQCSKVQDVLCDDRYQTIKLFTSVFGVGLKTAEKWYRKGFHSLEEVQADNAIHFTKMQKAGFLYYDDISAAVCKAEADAIGQIVEETVRLIAPDAIVTLTGGFRRGKECGHDVDFLITTPEMGKEQLLPKVINLWEKKGLLLYYDLVESTFDKTRLPCRKFEAMDHFQKCFAIIKLKKELAAGRVQKDWKAIRVDFVMPPVDNFAFALLGWTGSRQFERDLRRFARHERKMLLDNHALYDKTKKIFLPAKTEEDIFAHLGLDYIPPWQRNA

SEQ ID NO: 228 - protein, 354 aa, Artificial Sequence
  Modified TdT Sequences
TVSQYACQRRTTMENHNQIFTDAFAILAENAEFNESEGPCLAFRRAASLLKSLPHAISSSKDLEGLPCLGDQTSAVIEDILEYGQCSKVQDVLCDDRYQTIKLFTSVFGVGLKTAEKWYRKGFHTLEEVQADNAIHFTKMQKAGFLYYDDISAAVCKAEADAIGQIVEETVRLIAPDAIVTLTGGFRRGKECGHDVDFLITTPEMGKEQLLPKVINLWEKKGLLLYYDLVESTFDKTRLPCRKFEAMDHFQKCFAIIKLKKELAAGRVQKDWKAIRVDFVAPPVDNFAFALLGWTGSRQFERDLRRFARHERKMLLDNHALYDKTKKIFLPAKTEEDIFAHLGLDYIPPWQRNA

SEQ ID NO: 229 - protein, 354 aa, Artificial Sequence
  Modified TdT Sequences
TVSQYACQRRTTMENHNQIFTDAFAILAENAEFNESEGPCLAFRRAASLLKSLPHAISSSKDLEGLPCLGDQTKAVIEDILEYGQCSKVQDVLCDDRYQTIKLFTSVFGVGLKTAEKWYRKGFHSLEEVQADNSIHFTKMQKAGFLYYDDISAAVCKAEADAIGQIVEETVRLIAPDAIVTLTGGFRRGKECGHDVDFLITTPEMGKEQLLPKVINLWEKKGLLLYYDLVESTFDKTRLPCRKFEAMDHFQKCFAIIKLKKELAAGRVQKDWKAIRVDFVAPPVDNFAFALLGWTGSRQFERDLRRFARHERKMLLDNHALYDKTKKIFLPAKTEEDIFAHLGLDYIPPWQRNA

SEQ ID NO: 230 - protein, 354 aa, Artificial Sequence
  Modified TdT Sequences
TVSQYACQRRTTMENHNQIFTDAFAILAENAEFNESEGPCLAFRRAASLLKSLPHAISSSKDLEGLPCLGDQTKAVIEDILEYGQCSKVQDVLCDDRYQTIKLFTSVFGVGLKTAEKWYRKGFHSLEEVQADKAIHFTKMQKAGFLYYDDISAAVCKAEADAIGQIVEETVRLIAPDAIVTLTGGFRRGKECGHDVDFLITTPEMGKEQLLPKVINLWEKKGLLLYYDLVESTFDKTRLPCRKFEAMDHFQKCFAIIKLKKELAAGRVQKDWKAIRVDFVMPPVDNFAFALLGWTGSRQFERDLRRFARHERKMLLDRHALYDKTKKIFLPAKTEEDIFAHLGLDYIPPWQRNA

SEQ ID NO: 231 - protein, 354 aa, Artificial Sequence
  Modified TdT Sequences
TVSQYACQRRTTMENHNQIFTDAFAILAENAEFNESEGPCLAFRRAASLLKSLPHAISSSKDLEGLPCLGDQTKAVIEDILEYGQCSKVQDVLCDDRYQTIKLFTSVFGVGLKTAEKWYRKGFHSLEEVQADKAIHFTKMQKAGFLYYDDISAAVCKAEADAIGQIVEETVRLIAPDAIVTLTGGFRRGKECGHDVDFLITTPEMGKEQLLPKVINLWEKKGLLLYYDLVESTFDKTRLPCRKFEAMDHFQKCFAIIKLKKELAAGRVQKDWKAIRVDFVMPPVDNFAFALLGWTGSKQFERDLRRFARHERKMLLDNHALYDKTKKIFLPAKTEEDIFAHLGLDYIPPWQRNA

SEQ ID NO: 232 - protein, 354 aa, Artificial Sequence; identical to SEQ ID NO: 194
  Modified TdT Sequences

SEQ ID NO: 233 - protein, 354 aa, Artificial Sequence
  Modified TdT Sequences
TVSQYACQRRTTMENHNQIFTDAFAILAENAEFNESEGPCLAFRRAASLLKSLPHAISSSKDLEGLPCLGDQTKAVIEDILEYGQCSKVQDVLCDDRYQTIKLFTSVFGVGLKTAEKWYRKGFHSLEEVQADNTIHFTKMQKAGFLYYDDISAAVCKAEADAIGQIVEEAVRLIAPDAIVTLTGGFRRGKECGHDVDFLITTPEMGKEQLLPKVINLWEKKGLLLYYDLVESTFDKTRLPCRKFEAMDHFQKCFAIIKLKKELAAGRVQKDWKAIRVDFVMPPVDNFAFALLGWTGSRQFERDLRRFARHERKMLLDNHALYDKTKKIFLPAKTEEDIFAHLGLDYIPPWQRNA

SEQ ID NO: 234 - protein, 354 aa, Artificial Sequence
  Modified TdT Sequences
TVSQYACQRRTTMENHNQIFTDAFAILAENAEFNESEDPCLAFRRAASLLKSLPHAISSSKDLEGLPCLGDQTKAVIEDILEYGQCSKVQDVLCDDRYQTIKLFTSVFGVGLKTAEKWYRKGFHSLEEVQADNAIHFTKMQKAGFLYYDDISAAVCKAEADAIGQIVEETVRLIAPDAIVTLTGGFRRGKECGHDVDFLITTPEMGKEQLLPKVINLWEKKGLLLYYDLVESTFDKTRLPCRKFEAMDHFQKCFAIIKLKKELAAGRVQKDWKAIRVDFVMPPVDNFAFALLGWTGSRQFERDLRRFARHERKMLLDNHALYDKTKKIFLPAKTEEDIFAHLGLDYIPPWQRNA

SEQ ID NO: 235 - protein, 354 aa, Artificial Sequence
  Modified TdT Sequences
TVSPYACQRRTTMENHNQIFTDAFAILAENAEFNESEGPCLAFRRAASLLKSLPHAISSSRDLEGLPCLGDQTKAVIEDILEYGQCSKVQDVLCDDRYQTIKLFTSVFGVGLKTAEKWYRKGFHSLEEVQADKAIHFTKMQKAGFLYYDDISAAVCKAEAQAIGQIVEETVRLIAPDAIVTLTGGFRRGKECGHDVDFLITTPEMGKEQLLPKVINLWEKKGLLLYYDLVESTFDKTRLPCRKFEAMDHFQKCFAIIKLKKELAAGRVQKDWKAIRVDFVMPPVDNFAFALLGWTGSRQFERDLRRFARHERKMLLDNHALYDKTKKIFLPAKTEEDIFAHLGLDYIPPWQRNA

SEQ ID NO: 236 - protein, 354 aa, Artificial Sequence
  Modified TdT Sequences
TVSQYACQRRTTMENCNQIFTDAFAILAENAEFNESEGPCLAFRRAASLLKSLPHAISSSKDLEGLPCLGDQSKAVIEDILEYGQCSKVQDVLCDDRYQTIKLFTSVFGVGLKTAEKWYRKGFHSLEEVQADKAIHFTKMQKAGFLYYDDISAAVCKAEADAIGQIVEETVRLIAPDAIVTLTGGFRRGKECGHDVDFLITTPEMGKEQLLPKVINLWEKKGLLLYYDLVESTFDKTRLPCRKFEAMDHFQKCFAIIKLKKELAAGRVQKDWKAIRVDFVMAPVDNFAFALLGWTGSRQFERDLRRFARHERKMLLDNHALYDKTKKIFLPAKTEEDIFAHLGLDYIPPWQRNA

SEQ ID NO: 237 - protein, 354 aa, Artificial Sequence
  Modified TdT Sequences
TVSQYACQRRTTMENHNQIFTDAFAILAENAEFNESEGPCLAFRRAASLLKSLPHAISSSKDLEGLPCLGDQTKAVIEDILEYGQCSKVQDVLCDDRYQTIKLFTSVFGVGLKTAEKWYRKGFHSLEEVQADNAIHFTKMQKAGFLYYDDISAAVCKAEADAIGQIVEETVRLIAPDAIVTLTGGFRRGKECGHDVDFLITTPQMGKEQLLPKVINLWEKKGLLLYYDLVESTFDKTRLPCRKFEAMDHFQKCFAIIKLKKELAAGRVQKDWKAIRVDFVAPPVDNFAFALLGWTGSRQFERDLRRFARHEKKMLLDNHALYDKTKKIFLPAKTEEDIFAHLGLDYIPPWQRNA

SEQ ID NO: 238 - protein, 354 aa, Artificial Sequence
  Modified TdT Sequences
TVSQYACQRRTTMENHNQIFTDAFAILAENAEFNESEGPCLAFRRAASLLKSLPHAISSSKDLEGLPCLGDQSKAVIEDILEYGQCSKVQDVLCDDRYQTIKLFTSVFGVGLKTAEKWYRKGFHSLEEVQADNAIHFTKMQRAGFLYYDDISAAVCKAEADAIGQIVEETVRLIAPDAIVTLTGGFRRGKECGHDVDFLITTPEMGKEQLLPKVINLWEKKGLLLYYDLVESTFDKTRLPCRKFEAMDHFQKCFAIIKLKKELAAGRVQKDWKAIRVDFVVPPVDNFAFALLGWTGSRQFERDLRRFARHERKMLLDNHALYDKTKKIFLPAKTEEDIFAHLGLDYIPPWQRNA

SEQ ID NO: 239 - protein, 354 aa, Artificial Sequence
  Modified TdT Sequences
TVSQYACQRRTTMENHNQIFTDAFAILAENAEFNESEGPCLAFMRAASLLKSLPHPISSSKDLEGLPCLGDQTSAVIEDILEYGQCSKVQDVLCDDRYQTIKLFTSVFGVGLKTAEKWYRKGFHSLEEVQADNAIHFTKMQKAGFLYYDDISAAVCKAEADAIGQIVEETVRLIAPDAIVTLTGGFRRGKECGHDVDFLITTPEMGKEQLLPKVINLWEKKGLLLYYDLVESTFDKTRLPCRKFEAMDHFQKCFAIIKLKKELAAGRVQKDWKAIRVDFVAPPVDNFAFALLGWTGSRQFERDLRRFARHERKMLLDNHALYDKTKKIFLPAKTEEDIFAHLGLDYIPPWQRNA

SEQ ID NO: 240 - protein, 354 aa, Artificial Sequence
  Modified TdT Sequences
TVSQYACQRRTTMENHNQIFTDAFAILAENAEFNESEGPCLAFRRAASLLKSLPHAISSSKDLEGLPCLGDQTKAVIEDILEYGQCSKVQDVLCDDRYQTIKLFTSVFGVGLKTAEKWYRKGFHSLEEVQADKAIHFTKMQRAGFLYYDDISAAVCKAEADAIGQIVEETVRLIAPDAIVTLTGGFRRGKECGHDVDFLITTPEMRKEQLLPKVINLWEKKGLLLYYDLVESTFDKTRLPCRKFEAMDHFQKCFAIIKLKKELAAGRVQKDWKAIRVDFVMPPVDNFAFALLGWTGSRQFERDLRRFARHERKMLLDNHALYDKTKKIFLPAKTEEDIFAHLGLDYIPPWQRNA

SEQ ID NO: 241 - protein, 354 aa, Artificial Sequence
  Modified TdT Sequences
TVSQYACQRRTTMENHNQMFTDAFAILAENAEFNESEGPCLAFRRAASLLKSLPHAISSSKDLEGLPCLGDQTKAVIEDILEYGQCSKVQDVLCDDRYQTIKLFTSVFGVGLKTAEKWYRKGFHSLEEVQADKAIHFTKMQKAGFLYYDDISAAVCKAEADAIGQIVEETVRLIAPDAIVTLTGGFRRGKECGHDVDFLITTPEMGKEQLLPKVINLWEKKGLLLYYDLVESTFDKTRLPCRKFEAMDHFQKCFAIIKLKKELAAGRVQKDWKAIRVDFVMPPVDNFAFALLGWTGSRQFERDLRRFARHERKMLLDNHALYDKTKKIFLPAKTEEDIFAHLGLDYIPPWQRNA

SEQ ID NO: 242 - protein, 354 aa, Artificial Sequence
  Modified TdT Sequences
TVSQYACQRRTTMENHNQIFTDAFAILAENAEFNESEGPCLAFRRAASLLKSLPHAISSSKDLEGLPCLGDQTKAVIEDILEYGQCSKVQDVLCDDRYQTIKLFTSVFGVGLKTAEKWYRKGFHSLEEVQADNAIHFTKMQKAGFLYYDDISAAVCKAEADAIGQIVEETVRLIAPDAIVTLTGGFRRGKECGHDVDFLITTPEMGKEQLLPKVINLWEKKGLLLYYDLVESTFDKTRLPCRKFEAMDHFQKCFAIIKLKKELAAGRVQKDWKAIRVDFVVAPVDNFAFALLGWTGSRQFERDLRRWARHERKMLLDNHALYDKTKKIFLPAKTEEDIFAHLGLDYIPPWQRNA

SEQ ID NO: 243 - protein, 354 aa, Artificial Sequence
  Modified TdT Sequences
TVSQYACQRRTTMENCNQIFTDAFAILAENAEFNESEGPCLAFRRAASLLKSLPHAISSSKDLEGLPCLGDQTKAVIEDILEYGQCSKVQDVLCDDRYQTIKLFTSVFGVGLKTAEKWYRKGFHSLEEVQADKAIHFTKMQKAGFLYYDDISAAVCKAEAQAIGQIVEETVRLIAPDAIVTLTGGFRRGKECGHDVDFLITTPEMGKEQLLPKVINLWEKKGLLLYYDLVESTFDKTRLPCRKFEAMDHFQKCFAIIKLKKELAAGRVQKDWKAIRVDFVACPVDNFAFALLGWTGSRQFERDLRRFARHERKMLLDNHALYDKTKKIFLPAKTEEDIFAHLGLDYIPPWQRNA

SEQ ID NO: 244 - protein, 354 aa, Artificial Sequence
  Modified TdT Sequences
TVSQYACQRRTTMENHNQIFTDAFAILAENAEFNESEGPCLEFRRAASLLKSLPHAISSSKDLEGLPCLGDQTKAVIEDILEYGQCSKVQDVLCDDRYQTIKLFTSVFGVGLKTAEKWYRKGFHSLEEVQADKAIHFTKMQKAGFLYYDDISAAVCKAEADAIGQIVEETVRLIAPDAIVTLTGGFRRGKECGHDVDFLITTPEMRKEQLLPKVINLWEKKGLLLYYDLVESTFDKTRLPCRKFEAMDHFQKCFAIIKLKKELAAGRVQKDWKAIRVDFVMPPVDNFAFALLGWTGSRQFERDLRRFARHERKMLLDNHALYDKTKKIFLPAKTEEDIFAHLGLDYIPPWQRNA

SEQ ID NO: 245 - protein, 354 aa, Artificial Sequence
  Modified TdT Sequences
TVSQYACQRRTTMENHNQIFTDAFAILAENAEFNESEGPCLAFRRAASLLKSLPHAISSSKDLEGLPCLGDQTKAVIEDILEYGQCSKVQDVLCDDRYQTIKLFTSVFGVGLKTAEKWYRKGFHSLEEVQADKAIHFTKMQKAGFLYYDDISAAVCKAEADAIGQIVEETVWLIAPDAIVTLTGGFRRGKECGHDVDFLITTPEMGKEQLLPKVINLWEKKGLLLYYDLVESTFDKTRLPCRKFEAMDHFQKCFAIIKLKKELAAGRVQKDWKAIRVDFVACPVDNFAFALLGWTGSRQFERDLRRFARHERKMLLDNHALYDKTKKIFLPAKTEEDIFAHLGLDYIPPWQRNA

SEQ ID NO: 246 - protein, 354 aa, Artificial Sequence
  Modified TdT Sequences
TVSQYACQRRTTMENHNQIFTDAFAILAENAEFNESEGPCLAFRRAASLLKSLPHAISSSKDLEGLPCLGDQTSAVIEDILEYGQCSKVQDVLCDDRYQTIKLFTSVFGVGLKTAEKWYRKGFHSLEEVQADNAIHFTKMQKAGFLYYDDISAAVCKAEADAIGQIVEETVRLIAPDAIVTLTGGFRRGKECGHDVDFLITTPEMGKEQLLPKVINLWEKKGLLLYYDLVESTFDKTRLPCRKFEAMDHFQKCFAIIKLKKELAAGRVQKDWKAIRVDFVAPPVDNFAFALLGWTGSRQFERDLRRFARHERKMILDNHALYDKTKKIFLPAKTEEDIFAHLGLDYIPPWQRNA

SEQ ID NO: 247 - protein, 354 aa, Artificial Sequence
  Modified TdT Sequences
TVSQYACQRRTTMENHNQIFTDAFAILAENAEFNESEGPCLAFRRAASLLKSLPHAISSSKDLEGLPCLGDQSKAVIEDILEYGQCSKVQDVLCDDRYQTIKLFTSVFGVGLKTAEKWYRKGFHSLEEVQADKAIHFTKMQKAGFLYYDDISAAVCKAEADAIGQIVEETVWLIAPDAIVTLTGGFRRGKECGHDVDFLITTPEMGKEQLLPKVINLWEKKGLLLYYDLVESTFDKTRLPCRKFEAMDHFQKCFAIIKLKKELAAGRVQKDWKAIRVDFVMCPVDNFAFALLGWTGSRQFERDLRRFARHERKMLLDNHALYDKTKKIFLPAKTEEDIFAHLGLDYIPPWQRNA

SEQ ID NO: 248 - protein, 354 aa, Artificial Sequence
  Modified TdT Sequences
TVSQYACQRRTTMENHNQIFTDAFAILAENAEFNESEGPCLAFRRAASLLKSLPHAISSSKDLEGLPCLGDQTKRVIEDILEYGQCSKVQDVLCDDRYQTIKLFTSVFGVGLKTAEKWYRKGFHSLEEVQADNAIHFTKMQKAGFLYYDDISAAVCKAEADAIGQIVEETVRLIAPDAIVTLTGGFRRGKECGHDVDFLITTPEMGKEQLLPKVINLWEKKGLLLYYDLVESTFDKTRLPCRKFEAMDHFQKCFAIIKLKKELAAGRVQKDWKAIRVDFVAPPVDNFAFALLGWTGSRQFERDLRRFARHERKMLLDNHALYDKTKKIFLPAKTEEDIFAHLGLDYIPPWQRNA

SEQ ID NO: 249 - protein, 354 aa, Artificial Sequence
  Modified TdT Sequences
TVSQYACQRRTTMENHNQIFTDAFAVLAENAEFNESEGPCLAFRRAASLLKSLPHAISSSKDLEGLPCLGDQSKAVIEDILEYGQCSKVQDVLCDDRYQTIKLFTSVFGVGLKTAEKWYRKGFHSLEEVQADNAIHFTKMQKAGFLYYDDISAAVCKAEADAIGQIVEETVRLIAPDAIVTLTGGFRRGKECGHDVDFLITTPEMGKEQLLPKVINLWEKKGLLLYYDLVESTFDKTRLPCRKFEAMDHFQKCFAIIKLKKELAAGRVQKDWKAIRVDFVAPPVDNFAFALLGWTGSRQFERDLRRWARHERKMLLDNHALYDKTKKIFLPAKTEEDIFAHLGLDYIPPWQRNA

SEQ ID NO: 250 - protein, 354 aa, Artificial Sequence
  Modified TdT Sequences
TVSQYACQRRTTMENHNKIFTDAFAILAENAEFNESEGPCLAFRRAASLLKSLPHAISSSKDLEGLPCLGDQTKAVIEDILEYGQCSKVQDVLCDDRYQTIKLFTSVFGVGLKTAEKWYRKGFHSLEEVQADNAIHFTKMQKAGFLYYDDISAAVCKAEAQAIGQIVEETVRLIAPDAIVTLTGGFRRGKECGHDVDFLITTPEMGKEQLLPKVINLWEKKGLLLYYDLVESTFDKTRLPCRKFEAMDAFQKCFAIIKLKKELAAGRVQKDWKAIRVDFVAPPVDNFAFALLGWTGSRQFERDLRRFARHERKMLLDNHALYDKTKKIFLPAKTEEDIFAHLGLDYIPPWQRNA

SEQ ID NO: 251 - protein, 354 aa, Artificial Sequence
  Modified TdT Sequences
TVSQYACQRRTTMENHNQIFTDAFAILAENAEFNESEGPCLAFRRAASLLKSLPHAISSSKDLEGLPCLGDQTKAVIEDILEYGQCSKVQDVLCDDRYQTIKLFTSVFGVGLKTAEKWYRKGFHSLEEVQADNAIHFTKMQKAGFLYYDDISAAVCKAEADAIGQIVEEAVRLIAPDAIVTLTGGFRRGKECGHDVDFLITTPEMGKEQLLPKVINLWEKKGLLLYYDLVESTFDKTRLPCRKFEAMDHFQKCFAIIKLKKELAAGRVQKDWKAIRVDFVAPPVDNFAFALLGWTGSRQFERDLRRFARHERKMLLDNHALYDKTKKIFLPAKTEEDIFAHLGLDYIDPWQRNA

SEQ ID NO: 252 - protein, 354 aa, Artificial Sequence; identical to SEQ ID NO: 184
  Modified TdT Sequences

SEQ ID NO: 253 - protein, 354 aa, Artificial Sequence
  Modified TdT Sequences
TVSQYACQRRTTMENHNQIFTDAFAILAENAEFNESEGPCLAFRRAASLLKSLPHPISSSKDLEGLPCLGDQTKAVIEDILEYGQCSKVQDVLCDDRYQTIKLFTSVFGVGLKTAEKWYRKGFHSLEEVQADNAIHFTKMQKAGFLYYDDISAAVCKAEADAIGQIVEETVRLIAPDAIVTLTGGFRRGKECGHDVDFLITTPEMGKEQLLPKVINLWEKKGLLLYYDLVESTFDKTRLPCRKFEAMDHFQKCFAIIKLKKELAAGRVQKDWKAIRVDFVAPPVDNFAFALLGWTGSRQFERDLRRFARHERKMILDNHALYDKTKKIFLPAKTEEDIFAHLGLDYIPPWQRNA

SEQ ID NO: 254 - protein, 354 aa, Artificial Sequence
  Modified TdT Sequences
TVSQYACQRRTTMENHNQIFTDAFAILAENAEFNESEGPCLAFMRAASLLKSLPHAISSSKDLEGLPCLGDQTKAVIEDILEYGQCSKVQDVLCDDRYQTIKLFTSVFGVGLKTAEKWYRKGFHSLEEVQADNAIHFTKMQKAGFLYYDDISAAVCKAEADAIGQIVEETVRLIAPDAIVTLTGGFRRGKECGHDVDFLITSPEMGKEQLLPKVINLWEKKGLLLYYDLVESTFDKTRLPCRKFEAMDHFQKCFAIIKLKKELAAGRVQKDWKAIRVDFVAPPVDNFAFALLGWTGSRQFERDLRRFARHERKMLLDNHALYDKTKKIFLPAKTEEDIFAHLGLDYIPPWQRNA

SEQ ID NO: 255 - protein, 354 aa, Artificial Sequence
  Modified TdT Sequences
TVSQYACQRRTTMENHNQIFTDAFAILAENAEFNESEGPCVAFRRAASLLKSLPHAISSSKDLEGLPCLGDQTKAVIEDILEYGQCSKVQDVLCDDRYQTIKLFTSVFGVGLKTAEKWYRKGFHSLEEVQADNAIHFTKMQKAGFLYYDDISAAVCKAEADAIGQIVEETVRLIAPDAIVTLTGGFRRGKECGHDVDFLITTPEMGKEQLLPKVINLWEKKGLLLYYDLVESTFDKTRLPCRKFEAMDHFQKCFAIIKLKKELAAGRVQKDWKAIRVDFVMCPVDNFAFALLGWTGSRQFERDLRRFARHERKMLLDNHALYDKTKKIFLPAKTEEDIFAHLGLDYIPPWQRNA

SEQ ID NO: 256 - protein, 354 aa, Artificial Sequence
  Modified TdT Sequences
TVSQYACQRRTTMENHNQIFTDAFAILAENAEFNESEGPCLAFRRAASLLKSLPHAISSSKDLEGLPCLGDQTKAVIEDILEYGQCSKVQDVLCDDRYQTIKLFTSVFGVGLKTAEKWYRKGFHSLEEVQADNAIHFTKMQKAGFLYYDDISAAVCKAEADAIGQIVEETVRLIAPDAIVTLTGGFRRGKECGHDVDFLITTPEMGKEQLLPKVINLWEKKGLLLYYDLVESTFDKTRLPCRKFEAMDHFQKCFAIIKLKKELAAGRVQKDWKAIRVDFVACPYDNFAFALLGWTGSRQFERDLRRFARHERKMLLDNHALYDKTKKIFLPAKTEEDIFAHLGLDYIPPWQRNA

SEQ ID NO: 257 - protein, 354 aa, Artificial Sequence
  Modified TdT Sequences
TVSQYACQRRTTMENHNQIFTDAFAILAENAEFNESEGPCLAFMRAASLLKSLPHAISSSKDLEGLPCLGDQTKAVIEDILEYGQCSKVQDVLCDDRYQTIKLFTSVFGVGLKTAEKWYRKGFHSLEEVQADNAIHFTKMQKAGFLYYDDISAAVCKAEADAIGQIVEEAVRLIAPDAIVTLTGGFRRGKECGHDVDFLITTPEMGKEQLLPKVINLWEKKGLLLYYDLVESTFDKTRLPCRKFEAMDHFQKCFAIIKLKKELAAGRVQKDWKAIRVDFVVPPVDNFAFALLGWTGSRQFERDLRRFARHERKMLLDNHALYDKTKKIFLPAKTEEDIFAHLGLDYIPPWQRNA

SEQ ID NO: 258 - protein, 354 aa, Artificial Sequence
  Modified TdT Sequences
TVSQYACQRRTTMENHNQIFTDAFAILAENAEFNESEGPCLAFRRAASLLKSLPHAISSSKDLEGLPCLGDQTKAVIEDILEYGQCSKVQDVLCDDRYQTIKLFTSVFGVGLKTAEKWYRKGFHSLEEVQADNAIHFTKMQKAGFLYYDDISAAVCKAEADAIGQIVEETVRLIAPDAIVTLTGGFRRGKNCGHDVDFLITTPEMGKEQLLPKVINLWEKKGLLLYYDLVESTFDKTRLPCRKFEAMDHFQKCFAIIKLKKELAAGRVQKDWKAIRVDFVLCPVDNFAFALLGWTGSRQFERDLRRFARHERKMLLDNHALYDKTKKIFLPAKTEEDIFAHLGLDYIPPWQRNA

SEQ ID NO: 259 - protein, 354 aa, Artificial Sequence; identical to SEQ ID NO: 200
  Modified TdT Sequences

SEQ ID NO: 260 - protein, 354 aa, Artificial Sequence
  Modified TdT Sequences
TVSQYACQRRTTMENHNQIFTDAFAILAENAEFNESEGPCLAFRRAASLLKSLPHAISSSKDLEGLPCLGDQTKAVIEDILEYGQCSKVQDVLCDDRYQTIKLFTSVFGVGLKTAEKWYRKGFHSLEEVQADNAIHFTKMQKAGFLYYDDISAAVCKAEAQAIGQIVEETVRLIAPDAIVTLTGGFRRGKECGHDVDFLITTPEMGKEQLLPKVINLWEKKGLLLYYDLVESTFDKTRLPCRKFEAMDHFQKCFAIIKLKKELAAGRVQKDWKAIRVDFVAPPVDNFAFALLGWTGSRQFERDLRRFARHERKMLLDNHALYDKTKKIFLPAKTEEDIFAHLGLDYIPPWQRNA

SEQ ID NO: 261 - protein, 354 aa, Artificial Sequence
  Modified TdT Sequences
TVSQYACQRRTTMEHHNQIFTDAFAILAENAEFNESEGPCLAFRRAASLLKSLPHAISSSKDLEGLPCLGDQTKAVIEDILEYGQCSKVQDVLCDDRYQTIKLFTSVFGVGLKTAEKWYRKGFHTLEEVQADNSIHFTKMQKAGFLYYDDISAAVCKAEADAIGQIVEETVRLIAPDAIVTLTGGFRRGKECGHDVDFLITTPEMGKEQLLPKVINLWEKKGLLLYYDLVESTFDKTRLPCRKFEAMDHFQKCFAIIKLKKELAAGRVQKDWKAIRVDFVAPPVDNFAFALLGWTGSRQFERDLRRFARHERKMLLDNHALYDKTKKIFLPAKTEEDIFAHLGLDYIPPWQRNA

SEQ ID NO: 262 - protein, 354 aa, Artificial Sequence
  Modified TdT Sequences
TVSQYACQRRTTMENHNQIFTDAFAILAENAEFNESEGPCLAFRRAASLLKSLPHAISSSKDLEGLPCLGDQTKAVIEDILEYGQCSKVQDVLCDDRYQTIKLFTSVFGVGLKTAEKWYRKGLHSLEEVQADNAIHFTKMQKAGFLYYDDISAAVCKAEADAIGQIVEETVRLIAPDAIVTLTGGFRRGKECGHDVDFLITTPEMGKEQLLPKVINLWEKKGLLLYYDLVESTFDKTRLPCRKFEAMDHFQKCFAIIKLKKELAAGRVQKDWKAIRVDFVAAPVDNFAFALLGWTGSRQFERDLRRFARHERKMLLDNHALYDKTKKIFLPAKTEEDIFAHLGLDYIPPWQRNA

SEQ ID NO: 263 - protein, 354 aa, Artificial Sequence
  Modified TdT Sequences
TVSQYACQRRTTMENHNKIFTDAFAILAENAEFNESEGPCLAFRRAASLLKSLPHAISSSKDLEGLPCLGDQTKAVIEDILEYGQCSKVQDVLCDDRYQTIKLFTSVFGVGLKTAEKWYRKGFHSLEEVQADNAIHFTKMQKAGFLYYDDISAAVCKAEADAIGQIVEETVRLIAPDAIVTLTGGFRRGKECGHDVDFLITTPEMGKEQLLPKVINLWEKKGLLLYYDLVESTFDKTRLPCRKFEAMDHFQKCFAIIKLKKELAAGRVQKDWKAIRVDFVVPPVDNFAFALLGWTGSRQFERDLRRFARHEKKMLLDNHALYDKTKKIFLPAKTEEDIFAHLGLDYIPPWQRNA

SEQ ID NO: 264 - protein, 354 aa, Artificial Sequence
  Modified TdT Sequences
TVSQYACQRRTTMENHNQMFTDAFAILAENAEFNESEGPCLAFRRAASLLKSLPHAISSSKDLEGLPCLGDQTKAVIEDILEYGQCSKVQDVLCDDRYQTIKLFTSVFGVGLKTAEKWYRKGFHSLEEVQADKAIHFTKMQKAGFLYYDDISAAVCKAEADAIGQIVEETVRLIAPDAIVTLTGGFRRGKECGHDVDFLITTPEMRKEQLLPKVINLWEKKGLLLYYDLVESTFDKTRLPCRKFEAMDHFQKCFAIIKLKKELAAGRVQKDWKAIRVDFVLCPVDNFAFALLGWTGSRQFERDLRRFARHERKMLLDNHALYDKTKKIFLPAKTEEDIFAHLGLDYIPPWQRNA

SEQ ID NO: 265 - protein, 354 aa, Artificial Sequence
  Modified TdT Sequences
TVSQYACQRRTTMENHNQIFTDAFAILAENAEFNESEGPCLAFRRAASLLKSLPHAISSSKDLEGLPCLGDQTKAVIEDILEYGQCSKVQDVLCDDRYQTIKLFTSVFGVGLKTAEKWYRKGFHTLEEVQADNAIHFTKMQKAGFLYYDDISAAVCKAEADAIGQIVEETVRLIAPDAIVTLTGGFRRGKECGHDVDFLITTPEMGKEQLLPKVINLWEKKGLLLYYDLVESTFDKTRLPCRKFEAMDHFQKCFAIIKLKKELAAGRVQKDWKAIRVDFVAPPVDNFAFALLGWTGSRQFERDLRRFARHERKMLLDNHALYDKTKKIFLPAKTEEDIFAHLGLDYIDPWQRNA

SEQ ID NO: 266 - protein, 354 aa, Artificial Sequence
  Modified TdT Sequences
TVSQYACQRRTTMENHNQIFTDAFAILAENAEFNESEGPCLAFRRAASLLKSLPHAISSSKDLEGLPCLGDQSKAVIEDILEYGQCSKVQDVLCDDRYQTIKLFTSVFGVGLKTAEKWYRKGFHSLEEVQADKAIHFTKMQKAGFLYYDDISAAVCKAEADAIGQIVEETVRLIAPDAIVTLTGGFRRGKECGHDVDFLITTPEMGKEQLLPKVINLWEKKGLLLYYDLVESTFDKTRLPCRKFEAMDHFQKCFAIIKLKKELAAGRVQKDWKAIRVDFVAPPVDNFAFALLGWTGSRQFERDLRRFARHERKMLLDNHALYDKTKKIFLPAKTEEDIFAHLGLDYIPPWQRNA

SEQ ID NO: 267 - protein, 354 aa, Artificial Sequence
  Modified TdT Sequences
TVSQYACQRRTTMENHNQIFTDAFAILAENAEFNESEGPCLAFRRAASLLKSLPHAISSSKDLEGLPCLGDQTKAVIEDILEYGQCSKVQDVLCDDRYQTIKLFTSVFGVGLKTAEKWYRKGFHSLEEVQADKAIHFTKMQKAGFLYYDDISAAVCKAEAQAIGQIVEETVWLIAPDAIVTLTGGFRRGKECGHDVDFLITTPEMGKEQLLPKVINLWEKKGLLLYYDLVESTFDKTRLPCRKFEAMDHFQKCFAIIKLKKELAAGRVQKDWKAIRVDFVMPPVDNFAFALLGWTGSKQFERDLRRFARHERKMLLDNHALYDKTKKIFLPAKTEEDIFAHLGLDYIPPWQRNA

SEQ ID NO: 268 - protein, 354 aa, Artificial Sequence
  Modified TdT Sequences
TVSQYACQRRTTMENHNQIFTDAFAILAENAEFNESEGPCLAFMRAASLLKSLPHAISSSKDLEGLPCLGDQTKAVIEDILEYGQCSKVQDVLCDDRYQTIKLFTSVFGVGLKTAEKWYRKGFHSLEEVQADNAIHFTKMQKAGFLYYDDINAAVCKAEADAIGQIVEETVRLIAPDAIVTLTGGFRRGKECGHDVDFLITTPEMGKEQLLPKVINLWEKKGLLLYYDLVESTFDKTRLPCRKFEAMDHFQKCFAIIKLKKELAAGRVQKDWKAIRVDFVAPPVDNFAFALLGWTGSRQFERDLRRFARHERKMLLDNHALYDKTKKIFLPAKTEEDIFAHLGLDYIPPWQRNA

SEQ ID NO: 269 - protein, 354 aa, Artificial Sequence
  Modified TdT Sequences
TVSQYACQRRTTMENHNQIFTDAFAILAENAEFNESEGPCLAFRRAASLLKSLPHAISSSKDLEGLPCLGDQTKAVIEDILEYGQCSKVQDVLCDDRYQTIKLFTSVFGVGLKTAEKWYRKGLHSLEEVQADNAIHFTKMQKAGFLYYDDISAAVCKAEADAIGQIVEETVRLIAPDAIVTLTGGFRRGKECGHDVDFLITTPEMGKEQLLPKVINLWEKKGLLLYYDLVESTFDKTRLPCRKFEAMDHFQKCFAIIKLKKELAAGRVQKDWKAIRVDFVMPPVDNFAFALLGWTGSRQFERDLRRFARHERKMLLDNHALYDKTKKIFLPAKTEEDIFAHLGLDYIPPWQRNA

SEQ ID NO: 270 - protein, 354 aa, Artificial Sequence
  Modified TdT Sequences
TVSQYACQRRTTMENHNQIFTDAFAILAENAEFNESEGPCLAFRRAASLLKSLPHAISSSKDLEGLPCLGDQTKAVIEDILEYGQCSKVQDVLCDDRYQTIKLFTSVFGVGLKTAEKWYRKGFHSLEEVQADKAIHFTKMQRAGFLYYDDISAAVCRAEAQAIGQIVEETVRLIAPDAIVTLTGGFRRGKECGHDVDFLITTPEMGKEQLLPKVINLWEKKGLLLYYDLVESTFDKTRLPCRKFEAMDHFQKCFAIIKLKKELAAGRVQKDWKAIRVDFVMPPVDNFAFALLGWTGSRQFERDLRRFARHERKMLLDNHALYDKTKKIFLPAKTEEDIFAHLGLDYIPPWQRNA

SEQ ID NO: 271 - protein, 354 aa, Artificial Sequence
  Modified TdT Sequences
TVSQYACQRRTTMENHNQIFTDAFAILAENAEFNESEGPCLAFRRAASLLKSLPHAISSSKDLEGLPCLGDQTKAVIEDILEYGQCSKVQDVLCDDRYQTIKLFTSVFGVGLKTAEKWYRKGFHSLEEVQADKAIHFTKMQKAGFLYYDDISAAVCKAEADAIGQIVEETVRLIAPDAIVTLTGGFRRGKECGHDVDFLITTPEMGKEQLLPKVINLWEKKGLLLYYDLVESTFDKTRLPCRKFEAMDHFQKCFAIIKLKKELAAGRVQKDWKAIRVDFVACPVDNFAFALLGWTGSRQFERDLRRFARHERKMLLDNHALYDKTKKIFLPAKTEEDIFAHLGLDYIPPWQRNA

SEQ ID NO: 272 - protein, 354 aa, Artificial Sequence; identical to SEQ ID NO: 241
  Modified TdT Sequences

SEQ ID NO: 273 - protein, 354 aa, Artificial Sequence
  Modified TdT Sequences
TVSQYACQRRTTMENHNQIFTDAFAILAENAEFNESEGPCLAFRRAASLLKSLPHAISSSKDLEGLPCLGDQTKAVIEDILEYGQCSKVQDVLCDDRYQTIKLFTSVFGVGLKTAEKWYRKGFHSLEEVQADKAIHFTKMQKAGFLYYDDISAAVCKAEAQAIGQIVEETVRLIAPDAIVTLTGGFRRGKECGHDVDFLITTPEMGKEQLLPKVINLWEKKGLLLYYDLVESTFDKTRLPCRKFEAMDHFQKCFAIIKLKKELAAGRVQKDWKAIRVDFVACPVDNFAFALLGWTGSRQFERDLRRFARHERKMLLDNHALYDKTKKIFLPAKTEEDIFAHLGLDYIPPWQRNA

SEQ ID NO: 274 - protein, 354 aa, Artificial Sequence
  Modified TdT Sequences
TVSQYACQRRTTMENHNQIFTDAFAVLAENAEFNESEGPCLAFRRAASLLKSLPHAISSSKDLEGLPCLGDQTKAVIEDILEYGQCSKVQDVLCDDRYQTIKLFTSVFGVGLKTAEKWYRKGFHSLEEVKADNTIHFTKMQKAGFLYYDDISAAVCKAEADAIGQIVEETVRLIAPDAIVTLTGGFRRGKECGHDVDFLITTPEMGKEQLLPKVINLWEKKGLLLYYDLVESTFDKTRLPCRKFEAMDHFQKCFAIIKLKKELAAGRVQKDWKAIRVDFVAPPVDNFAFALLGWTGSRQFERDLRRFARHERKMLLDNHALYDKTKKIFLPAKTEEDIFAHLGLDYIPPWQRNA

SEQ ID NO: 275 - protein, 354 aa, Artificial Sequence
  Modified TdT Sequences
TVSQYACQRRTTMENHNQIFTDAFAILAENAEFNESEGPCLAFRRAASLLKSLPHAISSSKDLEGLPCLGDQTKAVIEDILEYGQCSKVQDVLCDDRYQSIKLFTSVFGVGLKTAEKWYRKGLHSLEEVQADNAIHFTKMQKAGFLYYDDINAAVCKAEADAIGQIVEETVRLIAPDAIVTLTGGFRRGKECGHDVDFLITTPEMGKEQLLPKVINLWEKKGLLLYYDLVESTFDKTRLPCRKFEAMDHFQKCFAIIKLKKELAAGRVQKDWKAIRVDFVAPPVDNFAFALLGWTGSRQFERDLRRFARHERKMLLDNHALYDKTKKIFLPAKTEEDIFAHLGLDYIPPWQRNA

SEQ ID NO: 276 - protein, 354 aa, Artificial Sequence
  Modified TdT Sequences
TVSQYACQRRTTMENHNQIFTDAFAILAENAEFNESEGPCLAFRRAASLLKSLPHAISSSKDLEGLPCLGDQTKAVIEDILEYGQCSKVQDVLCDDRYQTIKLFTSVFGVGLKTAEKWYRKGFHSLEEVQADNAIHFTKMQKAGFLYYDDISAAVCKAEADAIGQIVEETVRLIAPDAIVTLTGGFRRGKECGHDVDFLITTPEMGKEQLLPKVINLWEKKGLLLYYDLVESTFDKTRLPCRKFEAMDAFQKCFAIIKLKKELAAGRVQKDWKAIRVDFVAPPYDNFAFALLGWTGSRQFERDLRRFARHERKMLLDNHALYDKTKKIFLPAKTEEDIFAHLGLDYIPPWQRNA

SEQ ID NO: 277 - protein, 354 aa, Artificial Sequence
  Modified TdT Sequences
TVSQYACQRRTTMENHNQIFTDAFAILAENAEFNESEGPCLAFRRAASLLKSLPHAISSSKDLEGLPCLGDQTKAVIEDILEYGQCSKVQDVLCDDRYQTIKLFTSVFGVGLKTAEKWYRKGFHSLEEVQADKAIHFTKMQKAGFLYYDDISAAVCKAEADAIGQIVEETVRLIAPDAIVTLTGGFRRGKECGHDVDFLITTPEMGKEQLLPKVINLWEKKGLLLYYDLVESTFDKTRLPCRKFEAMDHFQKCFAIIKLKKELAAGRVQKDWKAIRVDFVMAPVDNFAFALLGWTGSRQFERDLRRFARHERKMLLDNHALYDKTKKIFLPAKTEEDIFAHLGLDYIPPWQRNA

SEQ ID NO: 278 - protein, 354 aa, Artificial Sequence
  Modified TdT Sequences
TVSQYACQRRTTMENHNQIFTDAFAILAENAEFNESEGPCLAFRRAASLLKSLPHAISSSKDLEGLPCLGDQTKAVIEDILEYGQCSKVQDVLCDDRYQTIKLFTSVFGVGLKTAEKWYRKGFHSLEEVQADKAIHFTKMQKAGFLYYDDISAAVCKAEADAIGQIVEETVRLIAPDAIVTLTGGFRRGKECGHDVDFLITTPEMGKEQLLPKVINLWEKKGLLLYYDLVESTFDKTRLPCRKFEAMDHFQKCFAIIKLKKELAAGRVQKDWKAIRVDFVMPPVDRFAFALLGWTGSRQFERDLRRFARHERKMLLDNHALYDKTKKIFLPAKTEEDIFAHLGLDYIPPWQRNA

SEQ ID NO: 279 - protein, 354 aa, Artificial Sequence
  Modified TdT Sequences
TVSQYACQRRTTMENHNQIFTDAFAILAENAEFNESEGPCLAFRRAASLLKSLPHAISSSKDLEGLPCLGDQTKAVIQDILEYGQCSKVQDVLCDDRYQTIKLFTSVFGVGLKTAEKWYRKGFHSLEEVQADNAIHFTKMQKAGFLYYDDISAAVCKAEADAIGQIVEETVRLIAPDAIVTLTGGFRRGKECGHDVDFLITTPEMGKEQLLPKVINLWEKKGLLLYYDLVESTFDKTRLPCRKFEAMDHFQKCFAIIKLKKELAAGRVQKDWKAIRVDFVAPPVDNFAFALLGWTGSRQFERDLRRFARHERKMLLDNHALYDKTKKIFLPAKTEEDIFAHLGLDYIPPWQRNA

SEQ ID NO: 280 - protein, 354 aa, Artificial Sequence
  Modified TdT Sequences
TVSQYACQRRTTMENHNQIFTDAFAILAENAEFNESEGPCLAFRRAASLLKSLPHAISSSKDLEGLPCLGDQTKAVIEDILEYGQCSKVQDVLCDDRYQTIKLFTSVFGVGLKTAEKWYRKGFHSLEEVQADKAIHFTKMQKAGFLYYDDISAAVCKAEAQAIGQIVEETVRLIAPDAIVTLTGGFRRGKECGHDVDFLITTPEMGKEQLLPKVINLWEKKGLLLYYDLVESTFDKTRLPCRKFEAMDHFQKCFAIIKLKKELAAGRVQKDWKAIRVDFVMPPVDNFAFALLGWTGSRQFERDLRRFARHERKMLLDNHALYDKTKKIFLPAKTEEDIFAHLGLDYIPPWQRNA

SEQ ID NO: 281 - protein, 354 aa, Artificial Sequence
  Modified TdT Sequences
TVSQYACQRRTTMENHNQIFTDAFAILAENAEFNESEGPCLAFRRAASLLKSLPHAISSSKDLEGLPCLGDQTKAVIEDILEYGQCSKVQDVLCDDRYQTIKLFTSVFGVGLKTAEKWYRKGLHSLEEVQADNAIHFTKMQKAGFLYYDDISAAVCKAEADAIGQIVEETVRLIAPDAIVTLTGGFRRGKECGHDVDFLITSPEMGKEQLLPKVINLWEKKGLLLYYDLVESTFDKTRLPCRKFEAMDAFQKCFAIIKLKKELAAGRVQKDWKAIRVDFVAPPVDNFAFALLGWTGSRQFERDLRRFARHERKMLLDNHALYDKTKKIFLPAKTEEDIFAHLGLDYIPPWQRNA

SEQ ID NO: 282 - protein, 354 aa, Artificial Sequence
  Modified TdT Sequences
TVSQYACQRRTTMENHNQIFTDAFAILAENAEFNESEGPCLAFRRAASLLKSLPHAISSSKDLEGLPCLGDQTKAVIEDILEYGQCSKVQDVLCDDRYQTIKLFTSVFGVGLKTAEKWYRKGFHSLEEVQADKAIHFTKMQKAGFLYYDDISAAVCKAEADAIGQIVEETVRLIAPDAIVTLTGGFRRGKECGHDVDFLITTPEMGKEQLLPKVINLWEKKGLLLYYDLVESTFDKTRLPCRKFEAMDHFQKCFAIIKLKKELAARRVQKDWKAIRVDFVACPVDNFAFALLGWTGSRQFERDLRRFARHERKMLLDNHALYDKTKKIFLPAKTEEDIFAHLGLDYIPPWQRNA

SEQ ID NO: 283 - protein, 354 aa, Artificial Sequence
  Modified TdT Sequences
TVSQYACQRRTTMENHNQIFTDAFAILAENAEFNESEGPCLAFRRAASLLKSLPHAISSSKDLEGLPCLGDQSKAVIEDILEYGQCSKVQDVLCDDRYQTIKLFTSVFGVGLKTAEKWYRKGFHSLEEVQADNAIHFTKMQKAGFLYYDDISAAVCKAEADAIGQIVEETVRLIAPDAIVTLTGGFRRGKECGHDVDFLITTPEMGKEQLLPKVINLWEKKGLLLYYDLVESTFDKTRLPCRKFEAMDHFQKCFAIIKLKKELAAGRVQKDWKAIRVDFVAPPVDNFAFALLGWTGSRQFERDLRRFARHERKMLLDNHALYDKTKKIFLPAKTEEDIFAHLGLDYIPPWQRNA

SEQ ID NO: 284 - protein, 354 aa, Artificial Sequence
  Modified TdT Sequences
TVSQYACQRRTTMENHNQIFTDAFAILAENAEFNESEGPCLAFRRAASLLKSLPHAISSSKDLEGLPCLGDQSKAVIEDILEYGQCSKVQDVLCDDRYQTIKLFTSVFGVGLKTAEKWYRKGFHSLEEVQADKAIHFTKMQKAGFLYYDDISAAVCRAEADAIGQIVEETVRLIAPDAIVTLTGGFRRGKECGHDVDFLITTPEMGKEQLLPKVINLWEKKGLLLYYDLVESTFDKTRLPCRKFEAMDHFQKCFAIIKLKKELAAGRVQKDWKAIRVDFVMPPVDNFAFALLGWTGSRQFERDLRRFARHERKMLLDNHALYDKTKKIFLPAKTEEDIFAHLGLDYIPPWQRNA

SEQ ID NO: 285 - protein, 354 aa, Artificial Sequence
  Modified TdT Sequences
TVSQYACQRRTTMENHNKIFTDAFAILAENAEFNESEGPCLAFRRAASLLKSLPHAISSSKDLEGLPCLGDQTKAVIEDILEYGQCSKVQDVLCDDRYQTIKLFTSVFGVGLKTAEKWYRKGFHSLEEVQADKAIHFTKMQKAGFLYYDDISAAVCKAEADAIGQIVEETVRLIAPDAIVTLTGGFRRGKECGHDVDFLITTPEMGKEQLLPKVINLWEKKGLLLYYDLVESTFDKTRLPCRKFEAMDHFQKCFAIIKLKKELAAGRVQKDWKAIRVDFVAPPVDNFAFALLGWTGSRQFERDLRRFARHERKMLLDNHALYDKTKKIFLPAKTEEDIFAHLGLDYIPPWQRNA

SEQ ID NO: 286 - protein, 354 aa, Artificial Sequence
  Modified TdT Sequences
TVSQYACQRRTTMENHNQIFTDAFAILAENAEFNESEGPCLAFRRAASLLKSLPHAISSSKDLEGLPCLGDQTKAVIEDILEYGQCSKVQDVLCDDRYQTIKLFTSVFGVGLKTAEKWYRKGFHSLEEVQADKAIHFTKMQKAGFLYYDDISAAVCKAEADAIGQIVEETVRLIAPDAIVTLTGGFRRGKECGHDVDFLITTPEMGKEQLLPKVINLWEKKGLLLYYDLVESTFDKTRLPCRKFEAMDHFQKCFAIIKLKKERAAGRVQKDWKAIRVDFVMCPVDNFAFALLGWTGSRQFERDLRRFARHERKMLLDNHALYDKTKKIFLPAKTEEDIFAHLGLDYIPPWQRNA

SEQ ID NO: 287 - protein, 354 aa, Artificial Sequence
  Modified TdT Sequences
TVSQYACQRRTTMENHNQIFTDAFAILAENAEFNESEGPCLAFRRAASLLKSLPHAISSSKDLEGLPCLGDQTKAVIEDILEYGQCSKVQDVLCDDRYQTIKLFTSVFGVGLKTAEKWYRKGFHSLEEVQADKAIHFTKMQKAGFLYYDDISAAVCKAEADAIGQIVEETVWLIAPDAIVTLTGGFRRGKECGHDVDFLITTPEMGKEQLLPKVINLWEKKGLLLYYDLVESTFDKTRLPCRKFEAMDHFQKCFAIIKLKKELAARRVQKDWKAIRVDFVMPPVDNFAFALLGWTGSRQFERDLRRFARHERKMLLDNHALYDKTKKIFLPAKTEEDIFAHLGLDYIPPWQRNA

SEQ ID NO: 288 - protein, 354 aa, Artificial Sequence
  Modified TdT Sequences
TVSQYACQRRTTMEHHNQIFTDAFAILAENAEFNESEGPCLAFRRAASLLKSLPHAISSSKDLEGLPCLGDQTKAVIEDILEYGQCSKVQDVLCDDRYQTIKLFTSVFGVGLKTAEKWYRKGFHSLEEVQADNAIHFTKMQKAGFLYYDDISAAVCKAEADAIGQIVEETVRLIAPDAIVTLTGGFRRGKECGHDVDFLITTPEMGKEQLLPKVINLWEKKGLLLYYDLVESTFDKTRLPCRKFEAMDHFQKCFAIIKLKKELAAGRVQKDWKAIRVDFVAPPYDNFAFALLGWTGSRQFERDLRRFARHERKMLLDNHALYDKTKKIFLPAKTEEDIFAHLGLDYIPPWQRNA

SEQ ID NO: 289 - protein, 354 aa, Artificial Sequence
  Modified TdT Sequences
TVSQYACQRRTTMENHNKIFTDAFAILAENAEFNESEGPCLAFRRAASLLKSLPHAISSSKDLEGLPCLGDQTKAVIEDILEYGQCSKVQDVLCDDRYQTIKLFTSVFGVGLKTAEKWYRKGFHSLEEVQADNAIHFTKMQKAGFLYYDDISAAVCKAEADAIGQIVEETVRLIAPDAIVTLTGGFRRGKECGHDVDFLITTPEMGKEQLLPKVINLWEKKGLLLYYDLVESTFDKTRLPCRKFEAMDHFQKCFAIIKLKKELAAGRVQKDWKAIRVDFVAPPVDNFAFALLGWTGSRQFERDLRRFARHERKMLLDNHALYDKTKKIFLPAKTEEDIFAHLGLDYIPPWQRNA

SEQ ID NO: 290 - protein, 354 aa, Artificial Sequence; identical to SEQ ID NO: 271
  Modified TdT Sequences

SEQ ID NO: 291 - protein, 354 aa, Artificial Sequence
  Modified TdT Sequences
TVSQYACQRRTTMENHNQIFTDAFAILAENAEFNESEGPCLAFRRAASLLKSLPHAISSSKDLEGLPCLGDQTKAVIEDILEYGQCSKVQDVLCDDRYQTIKLFTSVFGVGLKTAEKWYRKGFHSLEEVQADKAIHFTKMQRAGFLYYDDISAAVCKAEADAIGQIVEETVRLIAPDAIVTLTGGFRRGKECGHDVDFLITTPEMGKEQLLPKVINLWEKKGLLLYYDLVESTFDKTRLPCRKFEAMDHFQKCFAIIKLKKELAARRVQKDWKAIRVDFVMPPVDNFAFALLGWTGSRQFERDLRRFARHERKMLLDNHALYDKTKKIFLPAKTEEDIFAHLGLDYIPPWQRNA

SEQ ID NO: 292 - protein, 354 aa, Artificial Sequence
  Modified TdT Sequences
TVSQYACQRRTTMENHNQIFTDAFAILAENAEFNESEGPCLAFRRAASLLKSLPHAISSSKDLEGLPCLGDQTKAVIQDILEYGQCSKVQDVLCDDRYQTIKLFTSVFGVGLKTAEKWYRKGLHSLEEVQADNAIHFTKMQKAGFLYYDDISAAVCKAEADAIGQIVEETVRLIAPDAIVTLTGGFRRGKECGHDVDFLITTPEMGKEQLLPKVINLWEKKGLLLYYDLVESTFDKTRLPCRKFEAMDHFQKCFAIIKLKKELAAGRVQKDWKAIRVDFVVPPVDNFAFALLGWTGSRQFERDLRRFARHERKMLLDNHALYDKTKKIFLPAKTEEDIFAHLGLDYIPPWQRNA

SEQ ID NO: 293 - protein, 354 aa, Artificial Sequence; identical to SEQ ID NO: 190
  Modified TdT Sequences

SEQ ID NO: 294 - protein, 354 aa, Artificial Sequence
  Modified TdT Sequences
TVSQYACQRRTTMENHNQIFTDAFAILAENAEFNESEGPCLAFRRAASLLKSLPHAISSSKDLEGLPCLGDQTKAVIQDILEYGQCSKVQDVLCDDRYQTIKLFTSVFGVGLKTAEKWYRKGFHSLEEVQADNAIHFTKMQKAGFLYYDDINAAVCKAEAQAIGQIVEETVRLIAPDAIVTLTGGFRRGKECGHDVDFLITTPEMGKEQLLPKVINLWEKKGLLLYYDLVESTFDKTRLPCRKFEAMDHFQKCFAIIKLKKELAAGRVQKDWKAIRVDFVAPPVDNFAFALLGWTGSRQFERDLRRFARHERKMLLDNHALYDKTKKIFLPAKTEEDIFAHLGLDYIPPWQRNA

SEQ ID NO: 295 - protein, 354 aa, Artificial Sequence
  Modified TdT Sequences
TVSQYACQRRTTMENHNQIFTDAFAILAENAEFNESEGPCLAFRRAASLLKSLPHAISSSKDLEGLPCLGDQTKAVIEDILEYGQCSKVQDVLCDDRYQTIKLFTSVFGVGLKTAEKWYRKGFHSLEEVQADNAIHFTKMQRAGFLYYDDISAAVCKAEADAIGQIVEETVRLIAPDAIVTLTGGFRRGKECGHDVDFLITSPEMGKEQLLPKVINLWEKKGLLLYYDLVESTFDKTRLPCRKFEAMDHFQKCFAIIKLKKELAAGRVQKDWKAIRVDFVAPPVDNFAFALLGWTGSRQFERDLRRFARHERKMLLDNHALYDKTKKIFLPAKTEEDIFAHLGLDYIPPWQRNA

SEQ ID NO: 296 - protein, 354 aa, Artificial Sequence; identical to SEQ ID NO: 190
  Modified TdT Sequences

SEQ ID NO: 297 - protein, 354 aa, Artificial Sequence
  Modified TdT Sequences
TVSQYACQRRTTMENHNQIFTDAFAILAENAEFNESEGPCLAFRRAASLLKSLPHAISSSKDLEGLPCLGDQTKAVIEDILEYGQCSKVQDVLCDDRYQSIKLFTSVFGVGLKTAEKWYRKGFHSLEEVQADNAIHFTKMQKAGFLYYDDISAAVCKAEADAIGQIVEETVRLIAPDAIVTLTGGFRRGKECGHDVDFLITTPEMGKEQLLPKVINLWEKKGLLLYYDLVESTFDKTRLPCRKFEAMDHFQKCFAIIKLKKELAAGRVQKDWKAIRVDFVVPPVDNFAFALLGWTGSRQFERDLRRFARHERKMLLDNHALYDKTKKIFLPAKTEEDIFAHLGLDYIPPWQRNA

SEQ ID NO: 298 - protein, 354 aa, Artificial Sequence
  Modified TdT Sequences
TVSQYACQRRTTMENHNQIFTDAFAILAENAEFNESEGPCLAFRRAASLLKSLPHAISSSKDLEGLPCLGDQTKRVIEDILEYGQCSKVQDVLCDDRYQTIKLFTSVFGVGLKTAEKWYRKGFHSLEEVKADNAIHFTKMQKAGFLYYDDISAAVCKAEADAIGQIVEETVRLIAPDAIVTLTGGFRRGKECGHDVDFLITTPEMGKEQLLPKVINLWEKKGLLLYYDLVESTFDKTRLPCRKFEAMDHFQKCFAIIKLKKELAAGRVQKDWKAIRVDFVAPPVDNFAFALLGWTGSRQFERDLRRFARHERKMLLDNHALYDKTKKIFLPAKTEEDIFAHLGLDYIDPWQRNA

SEQ ID NO: 299 - protein, 354 aa, Artificial Sequence; identical to SEQ ID NO: 271
  Modified TdT Sequences

SEQ ID NO: 300 - protein, 354 aa, Artificial Sequence
  Modified TdT Sequences
TVSQYACQRRTTMENHNQIFTDAFAILAENAEFNESEGPCLAFRRAASLLKSLPHAISSSKDLEGLPCLGDQTKAVIEDILEYGQCSKVQDVLCDDRYQTIKLFTSVFGVGLKTAEKWYRKGFHSLEEVQADNSIHFTKMQKAGFLYYDDISAAVCKAEADAIGQIVEETVRLIAPDAIVTLTGGFRRGKECGHDVDFLITTPEMGKEQLLPKVINLWEKKGLLLYYDLVESTFDKTRLPCRKFEAMDHFQKCFAIIKLKKELAAGRVQKDWKAIRVDFVAPPYDNFAFALLGWTGSRQFERDLRRFARHERKMLLDNHALYDKTKKIFLPAKTEEDIFAHLGLDYIPPWQRNA

SEQ ID NO: 301 - protein, 354 aa, Artificial Sequence
  Modified TdT Sequences
TVSQYACQRRTTMENHNQIFTDAFAILAENAEFNESEGPCLAFRRAASLLKSLPHPISSSKDLEGLPCLGDQTKAVIEDILEYGQCSKVQDVLCDDRYQTIKLFTSVFGVGLKTAEKWYRKGFHSLEEVQADNSIHFTKMQKAGFLYYDDISAAVCKAEADAIGQIVEETVRLIAPDAIVTLTGGFRRGKECGHDVDFLITTPEMGKEQLLPKVINLWEKKGLLLYYDLVESTFDKTRLPCRKFEAMDHFQKCFAIIKLKKELAAGRVQKDWKAIRVDFVACPVDNFAFALLGWTGSRQFERDLRRFARHERKMLLDNHALYDKTKKIFLPAKTEEDIFAHLGLDYIPPWQRNA

SEQ ID NO: 302 - protein, 354 aa, Artificial Sequence
  Modified TdT Sequences
TVSQYACQRRTTMENHNQIFTDAFAILAENAEFNESEGPCLAFRRAASLLKSLPHAISSSKDLEGLPCLGDQTSAVIEDILEYGQCSKVQDVLCDDRYQTIKLFTSVFGVGLKTAEKWYRKGFHSLEEVQADNAIHFTKMQKAGFLYYDDISAAVCKAEAQAIGQIVEETVRLIAPDAIVTLTGGFRRGKECGHDVDFLITSPEMGKEQLLPKVINLWEKKGLLLYYDLVESTFDKTRLPCRKFEAMDHFQKCFAIIKLKKELAAGRVQKDWKAIRVDFVVPPVDNFAFALLGWTGSRQFERDLRRFARHERKMLLDNHALYDKTKKIFLPAKTEEDIFAHLGLDYIPPWQRNA

SEQ ID NO: 303 - protein, 354 aa, Artificial Sequence
  Modified TdT Sequences
TVSQYACQRRTTMENHNQIFTDAFAILAENAEFNESEGPCLAFRRAASLLKSLPHAISSSKDLEGLPCLGDQTKAVIQDILEYGQCSKVQDVLCDDRYQTIKLFTSVFGVGLKTAEKWYRKGFHSLEEVQADNAIHFTKMQKAGFLYYDDISAAVCKAEADAIGQIVEETVRLIAPDAIVTLTGGFRRGKECGHDVDFLITTPEMGKEQLLPKVINLWEKKGLLLYYDLVESTFDKTRLPCRKFEAMDHFQKCFAIIKLKKELAAGRVQKDWKAIRVDFVACPVDNFAFALLGWTGSRQFERDLRRFARHERKMLLDNHALYDKTKKIFLPAKTEEDIFAHLGLDYIPPWQRNA

SEQ ID NO: 304 - protein, 354 aa, Artificial Sequence
  Modified TdT Sequences
TVSQYACQRRTTMENHNQIFTDAFAILAENAEFNESEGPCVAFRRAASLLKSLPHAISSSKDLEGLPCLGDQTKAVIEDILEYGQCSKVQDVLCDDRYQTIKLFTSVFGVGLKTAEKWYRKGFHSLEEVQADKAIHFTKMQKAGFLYYDDISAAVCKAEADAIGQIVEETVRLIAPDAIVTLTGGFRRGKECGHDVDFLITTPEMGKEQLLPKVINLWEKKGLLLYYDLVESTFDKTRLPCRKFEAMDHFQKCFAIIKLKKELAAGRVQKDWKAIRVDFVMPPVDNFAFALLGWTGSRQFERDLRRFARHERKMLLDNHALYDKTKKIFLPAKTEEDIFAHLGLDYIPPWQRNA

SEQ ID NO: 305 - protein, 354 aa, Artificial Sequence
  Modified TdT Sequences
TVSQYACQRRTTMENHNRIFTDAFAILAENAEFNESEGPCLAFRRAASLLKSLPHAISSSKDLEGLPCLGDQTKAVIEDILEYGQCSKVQDVLCDDRYQTIKLFTSVFGVGLKTAEKWYRKGFHSLEEVQADKAIHFTKMQKAGFLYYDDISAAVCKAEADAIGQIVEETVRLIAPDAIVTLTGGFRRGKECGHDVDFLITTPEMGKEQLLPKVINLWEKKGLLLYYDLVESTFDKTRLPCRKFEAMDHFQKCFAIIKLKKELAAGRVQKDWKAIRVDFVACPVDNFAFALLGWTGSRQFERDLRRFARHERKMLLDNHALYDKTKKIFLPAKTEEDIFAHLGLDYIPPWQRNA

SEQ ID NO: 306 - protein, 354 aa, Artificial Sequence
  Modified TdT Sequences
TVSQYACQRRTTMENHNQIFTDAFAVLAENAEFNESEGPCLAFRRAASLLKSLPHAISSSKDLEGLPCLGDQTKAVIEDILEYGQCSKVQDVLCDDRYQTIKLFTSVFGVGLKTAEKWYRKGFHTLEEVQADNAIHFTKMQKAGFLYYDDISAAVCKAEAQAIGQIVEETVRLIAPDAIVTLTGGFRRGKECGHDVDFLITTPEMGKEQLLPKVINLWEKKGLLLYYDLVESTFDKTRLPCRKFEAMDHFQKCFAIIKLKKELAAGRVQKDWKAIRVDFVAPPVDNFAFALLGWTGSRQFERDLRRFARHERKMLLDNHALYDKTKKIFLPAKTEEDIFAHLGLDYIPPWQRNA

SEQ ID NO: 307 - protein, 354 aa, Artificial Sequence
  Modified TdT Sequences
TVSQYACQRRTTMENHNQIFTDAFAILAENAEFNESEGPCLAFRRAASLLKSLPHAISSSKDLEGLPCLGDQTKAVIEDILEYGQCSKVQDVLCDDRYQTIKLFTSVFGVGLKTAEKWYRKGFHSLEEVQADNAIHFTKMQKAGFLYYDDISAAVCKAEADAIGQIVEETVRLIAPDAIVTLTGGFRRGKECGHDVDFLITTPEMGKEQLLPKVINLWEKKGLLLYYDLVESTFDKTRLPCRKFEAMDHFQKCFAIIKLKKELAAGRVQKDWKAIRVDFVACPVDNFAFALLGWTGSRQFERDLRRWARHERKMILDNHALYDKTKKIFLPAKTEEDIFAHLGLDYIPPWQRNA

SEQ ID NO: 308 - protein, 354 aa, Artificial Sequence
  Modified TdT Sequences
TVSQYACQRRTTMENHNQIFTDAFAILAENAEFNESEGPCLAFRRAASLLKSLPHAISSSKDLEGLPCLGDQTKAVIEDILEYGQCSKVQDVLCDDRYQTIKLFTSVFGVGLKTAEKWYRKGFHSLEEVQADKAIHFTKMQKAGFLYYDDISAAVCKAEADAIGQIVEETVRLIAPDAIVTLTGGFRRGKNCGHDVDFLITTPEMGKEQLLPKVINLWEKKGLLLYYDLVESTFDKTRLPCRKFEAMDHFQKCFAIIKLKKELAAGRVQKDWKAIRVDFVMPPVDNFAFALLGWTGSRQFERDLRRFARHERKMLLDNHALYDKTKKIFLPAKTEEDIFAHLGLDYIPPWQRNA

SEQ ID NO: 309 - protein, 354 aa, Artificial Sequence; identical to SEQ ID NO: 222
  Modified TdT Sequences

SEQ ID NO: 310 - protein, 354 aa, Artificial Sequence
  Modified TdT Sequences
TVSQYACQRRTTMENHNQIFTDAFAILAENAEFNESEGPCLAFRRAASLLKSLPHAISSSKDLEGLPCLGDQTKAVIEDILEYGQCSKVQDVLCDDRYQSIKLFTSVFGVGLKTAEKWYRKGFHSLEEVQADNAIHFTKMQKAGFLYYDDISAAVCKAEADAIGQIVEETVRLIAPDAIVTLTGGFRRGKECGHDVDFLITTPEMGKEQLLPKVINLWEKKGLLLYYDLVESTFDKTRLPCRKFEAMDHFQKCFAIIKLKKELAAGRVQKDWKAIRVDFVAPPVDNFAFALLGWTGSRQFERDLRRFARHERKMLLDNHALYDKTKKIFLPAKTEEDIFAHLGLDYIPPWQRNA

SEQ ID NO: 311 - protein, 354 aa, Artificial Sequence
  Modified TdT Sequences
TVSQYACQRRTTMENCNQIFTDAFAILAENAEFNESEGPCLAFRRAASLLKSLPHAISSSKDLEGLPCLGDQTKAVIEDILEYGQCSKVQDVLCDDRYQTIKLFTSVFGVGLKTAEKWYRKGFHSLEEVQADKAIHFTKMQKAGFLYYDDISAAVCKAEADAIGQIVEETVRLIAPDAIVTLTGGFRRGKECGHDVDFLITTPEMGKEQLLPKVINLWEKKGLLLYYDLVESTFDKTRLPCRKFEAMDHFQKCFAIIKLKKERAAGRVQKDWKAIRVDFVMPPVDNFAFALLGWTGSRQFERDLRRFARHERKMLLDNHALYDKTKKIFLPAKTEEDIFAHLGLDYIPPWQRNA

SEQ ID NO: 312 - protein, 354 aa, Artificial Sequence
  Modified TdT Sequences
TVSPYACQRRTTMENHNQIFTDAFAILAENAEFNESEGPCLAFRRAASLLKSLPHAISSSKDLEGLPCLGDQTKAVIEDILEYGQCSKVQDVLCDDRYQTIKLFTSVFGVGLKTAEKWYRKGFHSLEEVQADKAIHFTKMQKAGFLYYDDISAAVCKAEADAIGQIVEETVRLIAPDAIVTLTGGFRRGKECGHDVDFLITTPEMGKEQLLPKVINLWEKKGLLLYYDLVESTFDKTRLPCRKFEAMDHFQKCFAIIKLKKELAAGRVQKDWKAIRVDFVMCPVDNFAFALLGWTGSRQFERDLRRFARHERKMLLDNHALYDKTKKIFLPAKTEEDIFAHLGLDYIPPWQRNA

SEQ ID NO: 313 - protein, 354 aa, Artificial Sequence
  Modified TdT Sequences
TVSQYACQRRTTMENHNQIFTDAFAILAENAEFNESEGPCLAFRRAASLLKSLPHAISSSKDLEGLPCLGDQTKAVIEDILEYGQCSKVQDVLCDDRYQTIKLFTSVFGVGLKTAEKWYRKGFHSLEEVQADNAIHFTKMQKAGFLYYDDISAAVCKAEADAIGQIVEEAVRLIAPDAIVTLTGGFRRGKECGHDVDFLITTPEMGKEQLLPKVINLWEKKGLLLYYDLVESTFDKTRLPCRKFEAMDHFQKCFAIIKLKKELAAGRVQKDWKAIRVDFVACPVDNFAFALLGWTGSRQFERDLRRFARHERKMLLDNHALYDKTKKIFLPAKTEEDIFAHLGLDYIPPWQRNA

SEQ ID NO: 314 - protein, 354 aa, Artificial Sequence
  Modified TdT Sequences
TVSQYACQRRTTMENHNRIFTDAFAILAENAEFNESEGPCLAFRRAASLLKSLPHAISSSKDLEGLPCLGDQTKAVIEDILEYGQCSKVQDVLCDDRYQTIKLFTSVFGVGLKTAEKWYRKGFHSLEEVQADNAIHFTKMQKAGFLYYDDISAAVCKAEADAIGQIVEETVRLIAPDAIVTLTGGFRRGKECGHDVDFLITTPEMGKEQLLPKVINLWEKKGLLLYYDLVESTFDKTRLPCRKFEAMDHFQKCFAIIKLKKELAAGRVQKDWKAIRVDFVMPPVDNFAFALLGWTGSRQFERDLRRFARHERKMLLDNHALYDKTKKIFLPAKTEEDIFAHLGLDYIPPWQRNA

SEQ ID NO: 315 - protein, 354 aa, Artificial Sequence; identical to SEQ ID NO: 312
  Modified TdT Sequences

SEQ ID NO: 316 - protein, 354 aa, Artificial Sequence
  Modified TdT Sequences
TVSQYACQRRTTMENHNQIFTDAFAILAENAEFNESEGPCLAFRRAASLLKSLPHPISSSKDLEGLPCLGDQTKAVIEDILEYGQCSKVQDVLCDDRYQTIKLFTSVFGVGLKTAEKWYRKGFHSLEEVKADNAIHFTKMQKAGFLYYDDISAAVCKAEADAIGQIVEETVRLIAPDAIVTLTGGFRRGKECGHDVDFLITTPEMGKEQLLPKVINLWEKKGLLLYYDLVESTFDKTRLPCRKFEAMDHFQKCFAIIKLKKELAAGRVQKDWKAIRVDFVAPPVDNFAFALLGWTGSRQFERDLRRFARHERKMLLDNHALYDKTKKIFLPAKTEEDIFAHLGLDYIPPWQRNA

SEQ ID NO: 317 - protein, 354 aa, Artificial Sequence
  Modified TdT Sequences
TVSQYACQRRTTMENHNQIFTDAFAILAENAEFNESEGPCLAFRRAASLLKSLPHAISSSKDLEGLPCLGDQTSAVIEDILEYGQCSKVQDVLCDDRYQTIKLFTSVFGVGLKTAEKWYRKGFHSLEEVQADNAIHFTKMQKAGFLYYDDISAAVCKAEADAIGQIVEETVRLIAPDAIVTLTGGFRRGKECGHDVDFLITTPQMGKEQLLPKVINLWEKKGLLLYYDLVESTFDKTRLPCRKFEAMDHFQKCFAIIKLKKELAAGRVQKDWKAIRVDFVAPPVDNFAFALLGWTGSRQFERDLRRFARHERKMLLDNHALYDKTKKIFLPAKTEEDIFAHLGLDYIPPWQRNA

SEQ ID NO: 318 - protein, 354 aa, Artificial Sequence
  Modified TdT Sequences
TVSQYACQRRTTMENHNQIFTDAFAILAENAEFNESEGPCLAFRRAASLLKSLPHAISSSKDLEGLPCLGDQTKAVIEDILEYGQCSKVQDVLCDDRYQTIKLFTSVFGVGLKTAEKWYRKGFHSLEEVKADNAIHFTKMQKAGFLYYDDISAAVCKAEADAIGQIVEETVRLIAPDAIVTLTGGFRRGKECGHDVDFLITTPEMGKEQLLPKVINLWEKKGLLLYYDLVESTFDKTRLPCRKFEAMDHFQKCFAIIKLKKELAAGRVQKDWKAIRVDFVAAPVDNFAFALLGWTGSRQFERDLRRFARHERKMLLDNHALYDKTKKIFLPAKTEEDIFAHLGLDYIPPWQRNA

SEQ ID NO: 319 - protein, 354 aa, Artificial Sequence
  Modified TdT Sequences
TVSQYACQRRTTMENHNQIFTDAFAILAENAEFNESEGPCLAFRRAASLLKSLPHAISSSKDLEGLPCLGDQTKAVIEDILEYGQCSKVQDVLCDDRYQTIKLFTSVFGVGLKTAEKWYRKGLHSLEEVQADNAIHFTKMQRAGFLYYDDISAAVCKAEADAIGQIVEETVRLIAPDAIVTLTGGFRRGKECGHDVDFLITTPEMGKEQLLPKVINLWEKKGLLLYYDLVESTFDKTRLPCRKFEAMDHFQKCFAIIKLKKELAAGRVQKDWKAIRVDFVACPVDNFAFALLGWTGSRQFERDLRRFARHERKMLLDNHALYDKTKKIFLPAKTEEDIFAHLGLDYIPPWQRNA

SEQ ID NO: 320 - protein, 354 aa, Artificial Sequence
  Modified TdT Sequences
TVSQYACQRRTTMENHNQIFTDAFAILAENAEFNESEGPCLAFRRAASLLKSLPHAISSSKDLEGLPCLGDQTKAVIEDILEYGQCSKVQDVLCDDRYQTIKLFTSVFGVGLKTAEKWYRKGFHSLEEVQADKAIHFTKMQKAGFLYYDDISAAVCRAEADAIGQIVEETVRLIAPDAIVTLTGGFRRGKECGHDVDFLITTPEMGKEQLLPKVINLWEKKGLLLYYDLVESTFDKTRLPCRKFEAMDHFQKCFAIIKLKKELAAGRVQKDWKAIRVDFVMCPVDNFAFALLGWTGSRQFERDLRRFARHERKMLLDNHALYDKTKKIFLPAKTEEDIFAHLGLDYIPPWQRNA

SEQ ID NO: 321 - protein, 354 aa, Artificial Sequence
  Modified TdT Sequences
TVSQYACQRRTTMENHNQIFTDAFAILAENAEFNESEGPCLAFRRAASLLKSLPHAISSSKDLEGLPCLGDQTKAVIEDILEYGQCSKVQDVLCDDRYQTIKLFTSVFGVGLKTAEKWYRKGFHSLEEVQADNAIHFTKMQKAGFLYYDDISAAVCKAEADAIGQIVEETVRLIAPDAIVTLTGGFRRGKECGHDVDFLITSPEMGKEQLLPKVINLWEKKGLLLYYDLVESTFDKTRLPCRKFEAMDHFQKCFAIIKLKKELAAGRVQKDWKAIRVDFVACPVDNFAFALLGWTGSRQFERDLRRFARHEKKMLLDNHALYDKTKKIFLPAKTEEDIFAHLGLDYIPPWQRNA

SEQ ID NO: 322 - protein, 354 aa, Artificial Sequence
  Modified TdT Sequences
TVSQYACQRRTTMENHNQIFTDAFAILAENAEFNESEGPCLAFMRAASLLKSLPHAISSSKDLEGLPCLGDQTKAVIEDILEYGQCSKVQDVLCDDRYQTIKLFTSVFGVGLKTAEKWYRKGFHSLEEVQADNAIHFTKMQKAGFLYYDDISAAVCKAEADAIGQIVEETVRLIAPDAIVTLTGGFRRGKECGHDVDFLITTPEMGKEQLLPKVINLWEKKGLLLYYDLVESTFDKTRLPCRKFEAMDHFQKCFAIIKLKKELAAGRVQKDWKAIRVDFVMPPVDNFAFALLGWTGSRQFERDLRRFARHERKMLLDNHALYDKTKKIFLPAKTEEDIFAHLGLDYIPPWQRNA

SEQ ID NO: 323 - protein, 354 aa, Artificial Sequence
  Modified TdT Sequences
TVSQYACQRRTTMENHNQIFTDAFAILAENAEFNESEGPCLAFRRAASLLKSLPHAISSSKDLEGLPCLGDQTKAVIQDILEYGQCSKVQDVLCDDRYQTIKLFTSVFGVGLKTAEKWYRKGFHSLEEVQADNAIHFTKMQKAGFLYYDDISAAVCKAEADAIGQIVEETVRLIAPDAIVTLTGGFRRGKECGHDVDFLITTPEMGKEQLLPKVINLWEKKGLLLYYDLVESTFDKTRLPCRKFEAMDAFQKCFAIIKLKKELAAGRVQKDWKAIRVDFVAPPVDNFAFALLGWTGSRQFERDLRRFARHERKMLLDNHALYDKTKKIFLPAKTEEDIFAHLGLDYIPPWQRNA

SEQ ID NO: 324 - protein, 354 aa, Artificial Sequence
  Modified TdT Sequences
TVSQYACQRRTTMENHNQIFTDAFAILAENAEFNESEGPCLAFRRAASLLKSLPHPISSSKDLEGLPCLGDQTKAVIEDILEYGQCSKVQDVLCDDRYQTIKLFTSVFGVGLKTAEKWYRKGFHSLEEVQADNAIHFTKMQKAGFLYYDDISAAVCKAEADAIGQIVEETVRLIAPDAIVTLTGGFRRGKECGHDVDFLITTPEMGKEQLLPKVINLWEKKGLLLYYDLVESTFDKTRLPCRKFEAMDAFQKCFAIIKLKKELAAGRVQKDWKAIRVDFVAPPVDNFAFALLGWTGSRQFERDLRRFARHERKMLLDNHALYDKTKKIFLPAKTEEDIFAHLGLDYIDPWQRNA

SEQ ID NO: 325 - protein, 354 aa, Artificial Sequence
  Modified TdT Sequences
TVSQYACQRRTTMENHNQIFTDAFAILAENAEFNESEGPCLAFRRAASLLKSLPHAISSSRDLEGLPCLGDQTKAVIEDILEYGQCSKVQDVLCDDRYQTIKLFTSVFGVGLKTAEKWYRKGFHSLEEVQADKAIHFTKMQRAGFLYYDDISAAVCKAEADAIGQIVEETVRLIAPDAIVTLTGGFRRGKECGHDVDFLITTPEMGKEQLLPKVINLWEKKGLLLYYDLVESTFDKTRLPCRKFEAMDHFQKCFAIIKLKKELAAGRVQKDWKAIRVDFVMCPVDNFAFALLGWTGSRQFERDLRRFARHERKMLLDNHALYDKTKKIFLPAKTEEDIFAHLGLDYIPPWQRNA

SEQ ID NO: 326 - protein, 354 aa, Artificial Sequence
  Modified TdT Sequences
TVSQYACQRRTTMENHNQIFTDAFAILAENAEFNESEGPCLAFRRAASLLKSLPHAISSSKDLEGLPCLGDQTKAVIEDILEYGQCSKVQDVLCDDRYQSIKLFTSVFGVGLKTAEKWYRKGFHSLEEVQADNAIHFTKMQKAGFLYYDDISAAVCKAEADAIGQIVEETVRLIAPDAIVTLTGGFRRGKECGHDVDFLITTPQMGKEQLLPKVINLWEKKGLLLYYDLVESTFDKTRLPCRKFEAMDHFQKCFAIIKLKKELAAGRVQKDWKAIRVDFVAPPVDNFAFALLGWTGSRQFERDLRRFARHERKMLLDNHALYDKTKKIFLPAKTEEDIFAHLGLDYIPPWQRNA

SEQ ID NO: 327 - protein, 354 aa, Artificial Sequence
  Modified TdT Sequences
TVSQYACQRRTTMENHNQIFTDAFAILAENAEFNESEGPCLAFRRAASLLKSLPHAISSSKDLEGLPCLGDQTKAVIEDILEYGQCSKVQDVLCDDRYQTIKLFTSVFGVGLKTAEKWYRKGFHSLEEVQADNAIHFTKMQKAGFLYYDDISAAVCKAEADAIGQIVEEAVRLIAPDAIVTLTGGFRRGKECGHDVDFLITTPEMGKEQLLPKVINLWEKKGLLLYYDLVESTFDKTRLPCRKFEAMDHFQKCFAIIKLKKELAAGRVQKDWKAIRVDFVAPPVDNFAFALLGWTGSRQFERDLRRFARHERKMLLDNHALYDKTKKIFLPAKTEEDIFAHLGLDYIPPWQRNA

SEQ ID NO: 328 - protein, 354 aa, Artificial Sequence
  Modified TdT Sequences
TVSQYACQRRTTMENHNKIFTDAFAILAENAEFNESEGPCLAFRRAASLLKSLPHAISSSKDLEGLPCLGDQTKRVIEDILEYGQCSKVQDVLCDDRYQTIKLFTSVFGVGLKTAEKWYRKGFHSLEEVQADNAIHFTKMQKAGFLYYDDISAAVCKAEADAIGQIVEETVRLIAPDAIVTLTGGFRRGKECGHDVDFLITTPEMGKEQLLPKVINLWEKKGLLLYYDLVESTFDKTRLPCRKFEAMDHFQKCFAIIKLKKELAAGRVQKDWKAIRVDFVAPPYDNFAFALLGWTGSRQFERDLRRFARHERKMLLDNHALYDKTKKIFLPAKTEEDIFAHLGLDYIPPWQRNA

SEQ ID NO: 329 - protein, 354 aa, Artificial Sequence
  Modified TdT Sequences
TVSQYACQRRTTMENHNQIFTDAFAILAENAEFNESEGPCVAFRRAASLLKSLPHAISSSKDLEGLPCLGDQTKAVIEDILEYGQCSKVQDVLCDDRYQTIKLFTSVFGVGLKTAEKWYRKGFHSLEEVQADKAIHFTKMQKAGFLYYDDISAAVCKAEADAIGQIVEETVRLIAPDAIVTLTGGFRRGKNCGHDVDFLITTPEMGKEQLLPKVINLWEKKGLLLYYDLVESTFDKTRLPCRKFEAMDHFQKCFAIIKLKKELAAGRVQKDWKAIRVDFVMAPVDNFAFALLGWTGSRQFERDLRRFARHERKMLLDNHALYDKTKKIFLPAKTEEDIFAHLGLDYIPPWQRNA

SEQ ID NO: 330 - protein, 354 aa, Artificial Sequence; identical to SEQ ID NO: 283
  Modified TdT Sequences

SEQ ID NO: 331 - protein, 354 aa, Artificial Sequence
  Modified TdT Sequences
TVSQYACQRRTTMENHNQIFTDAFAILAENAEFNESEGPCLAFRRAASLLKSLPHAISSSKDLEGLPCLGDQTKAVIEDILEYGQCSKVQDVLCDDRYQTIKLFTSVFGVGLKTAEKWYRKGFHSLEEVQADNAIHFTKMQKAGFLYYDDISAAVCKAEAQAIGQIVEETVRLIAPDAIVTLTGGFRRGKECGHDVDFLITTPEMGKEQLLPKVINLWEKKGLLLYYDLVESTFDKTRLPCRKFEAMDHFQKCFAIIKLKKELAAGRVQKDWKAIRVDFVMPPVDNFAFALLGWTGSRQFERDLRRFARHERKMLLDNHALYDKTKKIFLPAKTEEDIFAHLGLDYIPPWQRNA

SEQ ID NO: 332 - protein, 354 aa, Artificial Sequence
  Modified TdT Sequences
TVSQYACQRRTTMENHNQIFTDAFAILAENAEFNESEGPCLAFRRAASLLKSLPHAISSSKDLEGLPCLGDQTKAVIEDILEYGQCSKVQDVLCDDRYQTIKLFTSVFGVGLKTAEKWYRKGFHSLEEVQADNAIHFTKMQKAGFLYYDDISAAVCKAEAQAIGQIVEETVRLIAPDAIVTLTGGFRRGKECGHDVDFLITTPEMGKEQLLPKVINLWEKKGLLLYYDLVESTFDKTRLPCRKFEAMDHFQKCFAIIKLKKELAAGRVQKDWKAIRVDFVAPPVDNFAFALLGWTGSRQFERDLRRFARHERKMLLDNHALYDKTKKIFLPAKTEEDIFAHLGLDYIDPWQRNA

SEQ ID NO: 333 - protein, 354 aa, Artificial Sequence
  Modified TdT Sequences
TVSQYACQRRTTMENHNQIFTDAFAILAENAEFNESEGPCLAFRRAASLLKSLPHAISSSRDLEGLPCLGDQTKAVIEDILEYGQCSKVQDVLCDDRYQTIKLFTSVFGVGLKTAEKWYRKGFHSLEEVQADKAIHFTKMQKAGFLYYDDISAAVCKAEADAIGQIVEETVRLIAPDAIVTLTGGFRRGKECGHDVDFLITTPEMGKEQLLPKVINLWEKKGLLLYYDLVESTFDKTRLPCRKFEAMDHFQKCFAIIKLKKELAAGRVQKDWKAIRVDFVMAPVDNFAFALLGWTGSKQFERDLRRFARHERKMLLDNHALYDKTKKIFLPAKTEEDIFAHLGLDYIPPWQRNA

SEQ ID NO: 334 - protein, 354 aa, Artificial Sequence
  Modified TdT Sequences
TVSQYACQRRTTMENHNQIFTDAFAILAENAEFNESEGPCLAFRRAASLLKSLPHAISSSKDLEGLPCLGDQTKAVIEDILEYGQCSKVQDVLCDDRYQTIKLFTSVFGVGLKTAEKWYRKGFHSLEEVKADKAIHFTKMQKAGFLYYDDISAAVCKAEADAIGQIVEETVRLIAPDAIVTLTGGFRRGKECGHDVDFLITTPEMGKEQLLPKVINLWEKKGLLLYYDLVESTFDKTRLPCRKFEAMDHFQKCFAIIKLKKELAAGRVQKDWKAIRVDFVAPPVDNFAFALLGWTGSRQFERDLRRFARHERKMLLDNHALYDKTKKIFLPAKTEEDIFAHLGLDYIPPWQRNA

SEQ ID NO: 335 - protein, 354 aa, Artificial Sequence
  Modified TdT Sequences
TVSQYACQRRTTMENHNQIFTDAFAILAENAEFNESEGPCLAFRRAASLLKSLPHAISSSKDLEGLPCLGDQSKAVIEDILEYGQCSKVQDVLCDDRYQTIKLFTSVFGVGLKTAEKWYRKGFHTLEEVQADNAIHFTKMQKAGFLYYDDISAAVCKAEADAIGQIVEETVRLIAPDAIVTLTGGFRRGKECGHDVDFLITTPEMGKEQLLPKVINLWEKKGLLLYYDLVESTFDKTRLPCRKFEAMDHFQKCFAIIKLKKELAAGRVQKDWKAIRVDFVAPPVDNFAFALLGWTGSRQFERDLRRFARHERKMLLDNHALYDKTKKIFLPAKTEEDIFAHLGLDYIPPWQRNA

SEQ ID NO: 336 - protein, 354 aa, Artificial Sequence
  Modified TdT Sequences
TVSQYACQRRTTMENHNKIFTDAFAILAENAEFNESEGPCLAFRRAASLLKSLPHAISSSKDLEGLPCLGDQTKAVIEDILEYGQCSKVQDVLCDDRYQTIKLFTSVFGVGLKTAEKWYRKGFHSLEEVKADNAIHFTKMQKAGFLYYDDISAAVCKAEADAIGQIVEEAVRLIAPDAIVTLTGGFRRGKECGHDVDFLITTPEMGKEQLLPKVINLWEKKGLLLYYDLVESTFDKTRLPCRKFEAMDHFQKCFAIIKLKKELAAGRVQKDWKAIRVDFVAPPVDNFAFALLGWTGSRQFERDLRRFARHERKMLLDNHALYDKTKKIFLPAKTEEDIFAHLGLDYIPPWQRNA

SEQ ID NO: 337 - protein, 354 aa, Artificial Sequence
  Modified TdT Sequences
TVSQYACQRRTTMENHNQIFTDAFAILAENAEFNESEGPCLAFRRAASLLKSLPHAISSSKDLEGLPCLGDQSKAVIEDILEYGQCSKVQDVLCDDRYQTIKLFTSVFGVGLKTAEKWYRKGFHSLEEVQADNAIHFTKMQKAGFLYYDDINAAVCKAEADAIGQIVEETVRLIAPDAIVTLTGGFRRGKECGHDVDFLITTPEMGKEQLLPKVINLWEKKGLLLYYDLVESTFDKTRLPCRKFEAMDHFQKCFAIIKLKKELAAGRVQKDWKAIRVDFVAPPVDNFAFALLGWTGSRQFERDLRRFARHERKMLLDNHALYDKTKKIFLPAKTEEDIFAHLGLDYIPPWQRNA

SEQ ID NO: 338 - protein, 354 aa, Artificial Sequence; identical to SEQ ID NO: 271
  Modified TdT Sequences

SEQ ID NO: 339 - protein, 354 aa, Artificial Sequence; identical to SEQ ID NO: 327
  Modified TdT Sequences

SEQ ID NO: 340 - protein, 354 aa, Artificial Sequence
  Modified TdT Sequences
TVSQYACQRRTTMENHNKIFTDAFAILAENAEFNESEGPCLAFRRAASLLKSLPHAISSSKDLEGLPCLGDQTKAVIEDILEYGQCSKVQDVLCDDRYQTIKLFTSVFGVGLKTAEKWYRKGFHSLEEVQADNAIHFTKMQKAGFLYYDDISAAVCKAEADAIGQIVEETVRLIAPDAIVTLTGGFRRGKECGHDVDFLITTPEMGKEQLLPKVINLWEKKGLLLYYDLVESTFDKTRLPCRKFEAMDHFQKCFAIIKLKKELAAGRVQKDWKAIRVDFVACPVDNFAFALLGWTGSRQFERDLRRFARHERKMLLDNHALYDKTKKIFLPAKTEEDIFAHLGLDYIPPWQRNA

SEQ ID NO: 341 - protein, 354 aa, Artificial Sequence
  Modified TdT Sequences
TVSQYACQRRTTMENHNQIFTDAFAILAENAEFNESEGPCLEFRRAASLLKSLPHAISSSKDLEGLPCLGDQTKAVIEDILEYGQCSKVQDVLCDDRYQTIKLFTSVFGVGLKTAEKWYRKGFHSLEEVQADKAIHFTKMQKAGFLYYDDISAAVCKAEADAIGQIVEETVRLIAPDAIVTLTGGFRRGKECGHDVDFLITTPEMGKEQLLPKVINLWEKKGLLLYYDLVESTFDKTRLPCRKFEAMDHFQKCFAIIKLKKELAAGRVQKDWKAIRVDFVACPVDNFAFALLGWTGSRQFERDLRRFARHERKMLLDNHALYDKTKKIFLPAKTEEDIFAHLGLDYIPPWQRNA

SEQ ID NO: 342 - protein, 354 aa, Artificial Sequence
  Modified TdT Sequences
TVSQYACQRRTTMENHNQIFTDAFAILAENAEFNESEGPCLAFRRAASLLKSLPHAISSSKDLEGLPCLGDQTKRVIEDILEYGQCSKVQDVLCDDRYQTIKLFTSVFGVGLKTAEKWYRKGLHTLEEVQADNAIHFTKMQKAGFLYYDDISAAVCKAEADAIGQIVEETVRLIAPDAIVTLTGGFRRGKECGHDVDFLITTPEMGKEQLLPKVINLWEKKGLLLYYDLVESTFDKTRLPCRKFEAMDHFQKCFAIIKLKKELAAGRVQKDWKAIRVDFVAPPVDNFAFALLGWTGSRQFERDLRRFARHERKMLLDNHALYDKTKKIFLPAKTEEDIFAHLGLDYIPPWQRNA

SEQ ID NO: 343 - protein, 354 aa, Artificial Sequence
  Modified TdT Sequences
TVSQYACQRRTTMENHNRIFTDAFAILAENAEFNESEGPCLAFRRAASLLKSLPHAISSSKDLEGLPCLGDQTKAVIEDILEYGQCSKVQDVLCDDRYQTIKLFTSVFGVGLKTAEKWYRKGFHSLEEVQADKAIHFTKMQKAGFLYYDDISAAVCKAEADAIGQIVEETVRLIAPDAIVTLTGGFRRGKECGHDVDFLITTPEMGKEQLLPKVINLWEKKGLLLYYDLVESTFDKTRLPCRKFEAMDHFQKCFAIIKLKKELAAGRVQKDWKAIRVDFVACPVDNFAFALLGWTGSKQFERDLRRFARHERKMLLDNHALYDKTKKIFLPAKTEEDIFAHLGLDYIPPWQRNA

SEQ ID NO: 344 - protein, 362 aa, Artificial Sequence
  Modified TdT Sequence
MENLYFQGTVSQYACQRRTTMENHNQVFTDAFAILAENAEFNESEGPCLAFRRAASLLKSLPHAISSSKDLEGLPCLGDQTKAVIEDIFEYGQCSKVQDVLCDDRYQTIKLFTSVFGVGLKTAEKWYRKGFHSLEEVQADKAIHFTKMQKAGFLYYDDISAAVCKAEADAIGQIVEETVRLIAPDAIVTLTGGFRRGKEIGHDVDFLITTPEMGKEQLLPRVINLLEKKGLLLYYDLVESTFDKTRLPCRKFEAMDHFQKCFAIIKLKKELAAGRVQKDWKAIRVDFVMPPVDNFAFALLGWTGSRQFERDLRRFARHERKMLLDRHALYDKTKKIFLPAKTEEDIFAHLGLDYVPPWQRNA

SEQ ID NO: 345 - protein, 362 aa, Artificial Sequence
  Modified TdT Sequence
MENLYFQGTVSQYACQRRTTMENHNQIFTDAFAILAENAEFNESEGPALAFRRAASLLKSLPHAISSSKDLEGLPCLGDQTKAVIEDILEYGQCSKVQDVLCDDRYQTIKLFTSVFGVGLKTAEKWYRKGFHSLEEVQADKAIQFTKMQKAGFLYYDDISAAVCKAEADAIGCIVEETVRLIAPDAIVTLTGGFRRGKEIGHDVDFLITTPEAGKEQLLPKVIDLLEKKGLLLYYDLVESTFDKTRLPCRKFEAMDHFQKCFAIIKLKKELAAGRVQKDWKAIRVDFVMPPVDNFAFALLGWTGSRQFERDLRRFARHERKMLLDRHALYDKTKKIFLPAKTEEDIFAHLGLDYIPPWQRNA

SEQ ID NO: 346 - protein, 362 aa, Artificial Sequence
  Modified TdT Sequence
MENLYFQGTVSQYACQRRTTMENHNQIFTDAFAILAENAEFNESEGPCLAFRRAASLLKSLPHAISSSKDLEGLPCLGDQTKAVIEDIIEYGQCSKVQDVLCDDRYQTIKLFTSVFGVGLKTAEKWYRKGFHSLEDVQADKAIHFTKMQKAGFLYYDDISAAVCKAEADAIGQIVEETVRLIAPDAIVTLTGGFRRGKECGHDVDFLITTPEMGKEQLLPKVINLWEKKGLLLYYDLVESTFDKTRLPCRKFEAMDHFQKCFAIIKLKKELAAGRVQKDWKAIRVDFVMPPVDNFAFALLGWTGSRQFERDLRRFARHERKMLLDRHALYDRTKKIFLPAKTEEDIFAHLGLDYIPPWQRNA

SEQ ID NO: 347 - protein, 362 aa, Artificial Sequence
  Modified TdT Sequence
MENLYFQGTVSQYACQRRTTTENHNQIFTDAFAILAENAEFNESEGPALAFRRAASLLKSLPHAISSSKDLEGLPCLGDQTKAVIEDILEYGQCSKVQDVLCDDRYQTIKLFTSVFGVGLKTAEKWYRKGFHSLEEVQADKAIQFTKMQKAGFLYYDDISAAVCKAEADAIGQIVEETVRLIAPDAIVTLTGGFRRGKECGHDVDFLITTPEMGKEQLLPDVINLLEKKGLLLYYHLVESTFDKTRLPCRKFEAMDHFQKCFAIIKLKKELAAGRVQKDWKAIRVDFVMPPADNFAFALLGWTGSRQFERDLRRFARHERKMLLDRHALYDKTKKIFLPAKTEEDIFAHLGLDYIPPWQRNA

SEQ ID NO: 348 - protein, 362 aa, Artificial Sequence
  Modified TdT Sequence
MENLYFQGTVSQYACQRRTTMENHNQIFTDAFAILAENAEFNESEGPCLAFRRAASLLKSLPHAISSSKDLEGLPCLGDQTKAVIEDILEYGQCSKVQDVLCDDRYQTIKLFTSVFGVGLKTAEKWYRKGFHSLEEVQADKAIHFTKMQKAGFLYYDDISAAVCKAEADAIGQIVEETVRLIAPDAIVTLTGGFRRGKECGHDVDFLITTPEMGKEQLLPKVINLWEKKGLLLYYDLVESTFDKTRLPCRKFEAMDHFQKCFAIIKLKKELAAGRVQKDWKAIRVDFVLPPIDRFAFALLGWTGSRQFERDLRRFARHERKMLLDRHALYDKTKKIFLPAKTEEDIFAHLGLDYIPPWQRNA

SEQ ID NO: 349 - protein, 362 aa, Artificial Sequence
  Modified TdT Sequence
MENLYFQGTVSQYACQRRTTMENHNQIFTDAFAILAENAEFNESEGPCLAFRRAASLLKSLPHAISSSKDLEGLPCLGDQTKAVIEDILEYGQCSKVQDVLCDDRYQTIKLFTSVFGVGLKTAEKWYRKGFHSLEEVQADKAIHFTKMQKAGFLYYDDISAAVCKAEADAIGQIVEETVRLIAPDAIVTLTGGFRRGKECGHDVDFLITTPEMGKEQLLPKVINLWEKKGLLLYYDLVESTFDKTRLPCRKFEAMDHFQKCFAIIKLKKELAAGRVQKDWKAIRVDFVMPPVDNFAFALLGWTGSRQFERDLRRFARHERKMLLDRHALYDKTKKIFLPAKTEEDIFAHLGLDYIPPWQRNA

SEQ ID NO: 350 - protein, 362 aa, Artificial Sequence
  Modified TdT Sequence
MENLYFQGTVSQYACQRRTTMENHNQIFTDAFAILAENAEFNESEGPCLAFRRAASLLKSLPHAISSSKDLEGLPCLGDQTKAVIEDILEYGQCSKVQDVLCDDRYQTIKLFTSVFGVGLKTAEKWYRKGFHSLEEVQADKAIHFTKMQKAGFLYYDDITAAVCKAEADAIGQIVEETVRGIAPDAIVTLTGGFRRGKEIGHDVDFLITTPEMGKEQLLPRVINLLEKKGLLLYYDLVESTFDKTRLPCRKFEAMDHFQQCFAIIKLKKELAAGRVQKDWKAIRVDFVMPPVDNFAFALLGWTGSRQFERDLRRFARHERKMLLDRHALYDKTKKIFLPAKTEEDIFAHLGLDYIPPWQRNA

SEQ ID NO: 351 - protein, 362 aa, Artificial Sequence
  Modified TdT Sequence
MENLYFQGTVSQYACQRRTTMENHNQIFTDAFAILAENAEFNESEGPCLAFRRAASLLKSLPHAISSSKDLEGLPCLGDQTKAVIEDILEYGQCSKVQDVLCDDRYQTIKLFTSVFGVGLKTAEKWYRMGFHTLEEVQADKAIHFTKMQKAGFLYYDDISAAVCKAEADAIGQIVEETVRLIAPDAIVTLTGGFRRGKEIGHDVDFLITTPEMGKEQLLPRVINLLEKKGLLLYYDLVESTFDKTRLPCRKFEAMDHFQKCFAIIKLKKELAAGRVQKDWKAIRVDFVMPPVDNFAFALLGWTGSRQFERDLRRFARHERKMLLDRHALYDKTKRIFLPAKTEEDIFAHLGLDYIPPWQRNA

SEQ ID NO: 352 - protein, 362 aa, Artificial Sequence
  Modified TdT Sequence
MENLYFQGTVSQYACQRRTTMENHNQIFTDAFAILAENAEFNESEGPALAFRRAASLLKSLPHAISSSKDLEGLPCLGDQTKAVIEDILEYGQCSKVQDVLCDDRYQTIKLFTSVFGVGLKTAEKWYRKGFHSLEEVQADKAIQFTKMQKAGFLYYDDISAAVCKAEADAIGQIVEETVRLIAPDAIVTLTGGFRRGKECGHDVDFLITTPEMGKEQLLPDVINLLEKKGLLLYYDLVESTFDKTRLPCRKFEAMDHFQKCFAIIKLKKELAAGRVQKDWKAIRVDFVMPPIDNFAFALLGWTGSRQFERDLRRFARHERKMLLDRHALYDKTKKIFLPAKTEEDIFAHLGLDYIPPWQRNA

SEQ ID NO: 353 - protein, 362 aa, Artificial Sequence
  Modified TdT Sequence
MENLYFQGTVSQYACQRRTTMENHNQIFTDAFAILAENAEFNESEGPCVAFRRAASLLKSLPHAISSSKDLEGLPCLGDQTKAVIEDILEYGQCSKVQDVLCDDRYQTIKLFTSVFGVGLKTAEKWYRKGFHSLEEVQADKAIHFTKMQKAGFLYYDDISAAVCKAEADAIGQIVEETVRLIAPDAIVTLTGGFRRGKEIGHDVDFLITTPEMGREQLLPRLINLLEKKGLLLYYDLVESTFDKTRLPCRKFEAMDHFQKCFAIIKLKKELAAGRVQKDWKAIRVDFVMPPVDNFAFALLGWTGSRQFERDLRRFARHERKMLLDRHALYDKTKKIFLPAKTEEDIFAHLGLDYIPPWQRNA

SEQ ID NO: 354 - protein, 362 aa, Artificial Sequence
  Modified TdT Sequence
MENLYFQGTVSQYACQRRTTMENHNQIFTDAFAILAENAEFNESEGPAVAFRRAASLLKSLPHAISSSKDLEGLPCLGDQTKAVIEDILEYGQCSKVQDVLCDDRYQTIKLFTSVFGVGLKTAEKWYRKGFHSLEEVQADKAIHFTKMQKAGFLYYDDISAAVCKAEADAIGQIVEETVRLIAPDAILTLTGGFRRGKECGHDVDFLITTPEMGKEQLLPKVINLWEKKGLLLYYDLVESTFDKTRLPCRKFEAMDHFQKCFAIIKLKKELAAGRVQKDWKAIRVDFVMPPVDNFAFALLGWTGSRQFERDLRRFARHERKMLLDRHALYDKTKKIFLPAKTEEDIFAHLGLDYIPPWQRNA

SEQ ID NO: 355 - protein, 362 aa, Artificial Sequence
  Modified TdT Sequence
MENLYFQGTVSQYACQRRTTMENHNQIFTDAFAILAENAEFNESEGPCLAFRRAASLLKSLPHAISSSKDLEGLPCLGDQTKAVIEDILEYGQCSKVQDVLCDDRYQTIKLFTSVFGVGLKTAEKWYRMGFHSLEEVQADKAIQFTKMQKAGFLYYDDISAAVCKAEADAIGQIVEETVRLIAPDAIVTLTGGFRRGKEIGHDVDFLITTPEMGKEQLLPRVINLLEKKGLLLYYDLVESTFDKTRLPCRKFEAMDHFQKCFAIIKLKKELAAGRVQKDWKAIRVDFVMPPVDCFAFALLGWTGSRQFERDLRRFARHERKMLLDRHALYDKTKKIFLPAKTEEDIFAHLGLDYIPPWQRNA

SEQ ID NO: 356 - protein, 362 aa, Artificial Sequence
  Modified TdT Sequence
MENLYFQGTVSQYACQRRTTMENHNQIFTDAFAILAENAEFNESEGPALAFRRAASLLKSLPHAISSSKDLEGLPCLGDQTKAVIEDILEYGQCSKVQDVLCDDRYQTIKLFTSVFGVGLKTAEKWYRKGFHSLEEVQADNAIQFTKMQKAGFLYYDDISAAVCKAEADAIGQIVEETVRLIAPDAIVTLTGGFRRGKECGHDVDFLITTPEMGKEQLLPKVINLWEKKGLLLYYDLVESTFDKTRLPCRKFEAMDHFQKCFAIIKLKKELAAGRVQKDWKAIRVDFVMPPVDNFAFALLGWTGSRQFERDLRRFARHERKMLLDRHALYDKTKKIFLPAKTEEDIFAHLGLDYIPPWQRNA

SEQ ID NO: 357 - protein, 362 aa, Artificial Sequence
  Modified TdT Sequence
MENLYFQGTVSQYACQRRTTMENHNQIFTDAFAILAENAEFNESEGPALAFRRAASLLKSLPHAISSSKDLEGLPCLGDQTKAVIEDILEYGQCSKVQDVLCDDRYQTIKLFTSVFGVGLKTAEKWYRKGFHSLEEVQADKAIQFTKMQRAGFLYYDDISAAVCKAEADAIGQIVEETVRLIAPDAIVTLTGGFRRGKEIGHDVDFLITTPEMGKEQLLPKVINLLEKKGLLLYYDLVESTFDKTRLPCRKFEAMDHFQKCFAIIKLKKELAAGRVQKDWKAIRVDFVMPPIDNFAFALLGWTGSRQFERDLRRFARHERKMLLDRHALYDKTKKIFLPAKTEEEIFAHLGLDYIPPWQRNA

SEQ ID NO: 358 - protein, 362 aa, Artificial Sequence
  Modified TdT Sequence
MENLYFQGTVSQYACQRRTTMENHNQIFTDAFAILAENAEFNESEGPCLAFRRAASLLKSLPHAISSSKDLEGLPCLGDQSKAVIEDILEYGQCSKVQDVLCDDRYQTIKLFTSVFGVGLKTAEKWYRKGFHSLEEVQADKAIHFTKMQRAGFLYYDDISAAVCKAEADAIGQIVEETVRLIAPDAIVTLTGGFRRGKECGHDVDFLITTPEMGKEQLLPKIINLWEKKGLLLYYDLVESTFDKTRLPCRKFEAMDHFQKCFAIIKLKKELAAGRVQKDWKAIRVDFVMPPVDNFAFALLGWTGSRQFERDLRRFARHERKMLLDRHALYDKTKKIFLPAKTEEDIFAHLGLDYIPPWQRNA

SEQ ID NO: 359 - protein, 362 aa, Artificial Sequence
  Modified TdT Sequence
MENLYFQGTVSQYACQRRTTMENHNQVFTDAFAILAENAEFNESEGPALAFRRAASLLKSLPHAISSSKDLEGLPCLGDQTKAVIEDILEYGQCSKVQDVLCDDRYQTIKLFTSVFGVGLKTAEKWYRKGFHSLEEVQADKAIQFTKMQKAGFLYYDDISAAVCKAEADAIGQIVEETVRKIAPDAIVTLTGGFRRGKEIGHDVDFLITTPEMGKEQLLPKVINLLEKKGLLLYYDLVESTFDKTRLPCRKFEAMDHFQKCFAIIKLKKELAAGRVQKDWKAIRVDFVMPPVDNFAFALLGWTGSRQFERDLRRFARHERKMLLDRHALYDRTKKIFLPAKTEEDIFAHLGLDYIPPWQRNA

SEQ ID NO: 360 - protein, 362 aa, Artificial Sequence
  Modified TdT Sequence
MENLYFQGTVSQYACQRRTTMENHNQIFTDAFAILAENAEFNESEGPALAFRRAASLLKSLPHAISSSKDLEGLPCLGEQTKAVIEDILEYGQCSKVQDVLCDDRYQTIKLFTSVFGVGLKTAEKWYRKGFHSLEEVQADKAIQFTKMQKAGFLYYDDISAAVCKAEADAIGQIVEETVHLIAPDAIVTLTGGFRRGKECGHDVDFLITTPEMGKEQLLPDVINLLEKKGLLLYYDLVESTFDKTRLPCRKFEAMDHFQKCFAIIKLEKELAAGRVQKDWKAIRVDFVMPPIDNFAFALLGWTGSRQFERDLRRFARHERKMLLDRHALYDKTKKIFLPAKTEEDIFAHLGLDYIPPWQRNA

SEQ ID NO: 361 - protein, 362 aa, Artificial Sequence
  Modified TdT Sequence
MENLYFQGTVSQYACQRRTTMENHNQIFTDAFAILAENAEFRESEGPALAFRRAASLLKSLPHAISSSKDLEGLPCLGDQTKAVIEDILEYGQCSKVQDVLCDDRYQTIKLFTSVFGVGLKTAEKWYRKGFHTLEEVQADKAIQFTKMQRAGFLYYDDISAAVCKAEADAIGQIVEETVRLIAPDAIVTLTGGFRRGKEIGHDVDFLITTPEMGKEQLLPKVINLLEKKGLLLYYDLVESTFDKTRLPCRKFEAMDHFQKCFAIIKLKKELADGRVQKDWKAIRVDFVMPPVDNFAFALLGWTGSRQFERDLRRFARHERKMLLDRHALYDKTKKIFLPAKTEEDIFAHLGLDYIPPWQRNA

SEQ ID NO: 362 - protein, 362 aa, Artificial Sequence
  Modified TdT Sequence
MENLYFQGTVSQYACQRRTTMENHNQIFTDAFAILAENAEFNESEGPALAFRRAASLLKSLPHAISSSKDLEGLPCLGDQTKAVIEDILEYGQCSKVQDVLCDDRYQTIKLFTSVFGVGLKTAEKWYRKGFHSLEEVQADKAIHFTKMQKAGFLYYDDISAAVCKAEADAIGQIVEETVRLIAPDAIVTLTGGFRRGKEIGHDVDFLITTPEMGREQLLPKVINLLEKKGLLLYYDLVESTFDKTRLPCRKFEAMDHFQKCFAIIKLKKELAAGRVQKDWKAIRVDFVMPPIDNFAFALLGWTGSRQFERDLRRFARHERKMLLDRHALYDKTKKIFLPAKTEEDIFAHLGLDYIPPWQRNA

SEQ ID NO: 363 - protein, 362 aa, Artificial Sequence
  Modified TdT Sequence
MENLYFQGTVSQYACQRRTTMENHNQIFTDAFAILAENAEFNESEGPCLAFRRAASLLKSLPHAISSSKDLEDLPCLGDQTKAVIEDILEYGQCSKVQDVLCDDRYQTIKLFTSVFGVGLKTAEKWYRKGFHSLEEVQADKAIHFTKMQKAGFLYYDDISAAVCKAEADAIGQIVEETVRLIAPDAIVTLTGGFRRGKEIGHDVDFLITTPEMGKEQLLPRVINLLEKKGLLLYYDLVESTFDKTRLPCRKFEAMDHFQKCFAIIKLKKELADGRVQKDWKAIRVDFVMPPVDNFAFALLGWTGSRQFERDLRRFARHERKMLLDRHALYDKTKRIFLPAKTEEDIFAHLGLDYIPPWQRNA

SEQ ID NO: 364 - protein, 362 aa, Artificial Sequence
  Modified TdT Sequence
MENLYFQGTVSQYACQRRTTMENHNQIFTDAFAILAENAEFNESEGPALAFRRAASLLKSLPHAISSSKDLEGLPCLGDQTKAVIEDILEYGQCSKVQDVLCDDRYQTIKLFTSVFGVGLKTAEKWYRKGFHTLEEVQADKAIQFTKMQKAGFLYYDDISAAVCKAEADAIGQIVEETVRLIAPDAIVTLTGGFRRGKEIGHDVDFLITTPEMGKEQLLPKVIDLLEKKGLLLYYDLVESTFDKTRLPCRKFEAMDHFQKCFAIIKLKKELAAGRVQKDWKAIRVDFVMPPIDNFAFALLGWTGSRQFERDLRRFARHERKMLLDRHALYDKTKKIFLPAKTEEDIFAHLGLDYIPPWQRNA

SEQ ID NO: 365 - protein, 362 aa, Artificial Sequence
  Modified TdT Sequence
MENLYFQGTVSQYACQRRTTMENHNQIFTDAFAILAENAEFNESEGPALAFRRAASLLKSLPHAISSSKDLEGLPCLGDQTKAVIEDILEYGQCSKVQDVLCDDRYQTIKLFTSVFGVGLKTAEKWYRKGFHSLEEVQADRAIQFTKMQKAGFLYYDDISAAVCKAEADAIGQIVEETVRLIAPDAIVTLTGGFRRGKEIGHDVDFLITTPEMGKEQLLPKVINLLEKKGLLLYYDLVESTFDKTRLPCRKFEAMDHFQKCFAIIKLKKELAAGRVQKDWKAIRVDFVMPPVDNFAFALLGWTGSRQFERDLRRFARHERKMLLDRHALYDKTKKIFLPAKTEEEIFAHLGLEYIPPWQRNA

SEQ ID NO: 366 - protein, 362 aa, Artificial Sequence
  Modified TdT Sequence
MENLYFQGTVSQYACQRRTTMENHNQIFTDAFAILAENAEFNESEGPALAFRRAASLLKSLPHAISSSKDLEGLPCLGDQTKAVIEDILEYGQCSKVQDVLCDDRYQTIKLFTSVFGVGLKTAEKWYRKGFHSLEEVQADKAIQFTKMQRAGFLYYDDISAAVCKAEADAIGQIVEETVRLIAPDAIVTLTGGFRRGKEIGHDVDFLITTPEMGREQLLPDVINLLEKKGLLLYYDLVESTFDKTRLPCRKFEAMDHFQKCFAIIKLKKELAAGRVQKDWKAIRVDFVMPPVDNFAFALLGWTGSRQFERDLRRFARHERKMLLDRHALYDKTKKIFLPAKTEEDIFAHLGLDYIPPWQRNA

SEQ ID NO: 367 - protein, 362 aa, Artificial Sequence
  Modified TdT Sequence
MENLYFQGTVSQYACQRRTTMENHNQIFTDAFAILAENAEFNESEGPALAFRRAASLLKSLPHAISSSKDLEGLPCLGDQTKGVIEDILEYGQCSKVQDVLCDDRYQTIKLFTSVFGVGLKTAEKWYRKGFHSLEEVQADKAIQFTKMQKAGFLYYDDISAAVCKAEADAIGQIVEETVRLIAPDAIVTLTGGFRRGKEIGHDVDFLITTPEQGKEQLLPKVINLLEKKGLLLYYDLVESTFDKTRLPCRKFEAMDHFQKCFAIIKLKKELAAGRVQKDWKAIRVDFVMPPVDNFAFALLGWTGSRQFERDLRRFARHERKMLLDRHALYDKTKKIFLPAKSEEDIFAHLGLDYIPPWQRNA

SEQ ID NO: 368 - protein, 362 aa, Artificial Sequence
  Modified TdT Sequence
MENLYFQGTVSQYACQRRTTMENHNQVFTDAFAILAENAEFNESEGPALAFRRAASLLKSLPHAISSSKDLEGLPCLGDQTKAVIEDILEYGQCSKVQDVLCDDRYQTIKLFTSVFGVGLKTAEKWYRKGFHSLEEVQADKAIQFTKMQKAGFLYYDDISAAVCKAEADAIGQIVEETVRLIAPDALVTLTGGFRRGKEIGHDVDFLITTPEMGKEQLLPKLIDLLEKKGLLLYYDLVESTFDKTRLPCRKFEAMDHFQKCFAIIKLKKELAAGRVQKDWKAIRVDFVMPPVDNFAFALLGWTGSRQFERDLRRFARHERKMLLDRHALYDKTKKIFLPAKTEEDIFAHLGLDYIPPWQRNA

SEQ ID NO: 369 - protein, 362 aa, Artificial Sequence
  Modified TdT Sequence
MENLYFQGTVSQYACQRRTTMENHNQIFTDAFAILAENAEFNENEGPCLAFRRAASLLKSLPHAISSSKDLEGLPCLGDQTKAVIEDILEYGQCSKVQDVLCDDRYQTIKLFTSVFGVGLKTAEKWYRKGFHSLEEVQADKAIHFTKMQRAGFLYYDDISAAVCKAEADAIGQIVEETVRLIAPDAIVTLTGGFRRGKEIGHDVDFLITTPEMGKEQLLPRVINLWEKKGLLLYYDLVESTFDKTRLPCRKFEAMDHFQKCFAIIKLKKELAAGRVQKDWKAIRVDFVMPPVDNFAFALLGWTGSRQFERDLRRFARHERKMLLDRHALYDKTKKIFLPAKTEEDIFAHLGLDYIPPWQRNA

SEQ ID NO: 370 - protein, 362 aa, Artificial Sequence
  Modified TdT Sequence
MENLYFQGTVSQYACQRRTTMENHNQIFTDAFAILAENAEFNESEGPALAFRRAASLLKSLPHAISSSKDLEGLPCLGDQTKAVIEDILEYGQCSKVQDVLCDDRYQTIKLFTSVFGVGLKTAEKWYRKGFHSLEEVQADKAIQFTKMQRAGFLYYDDISAAVCKAEADAIGQIVEETVRLIAPDAIVTLTGGFRRGKEIGHDVDFLITTPEMGKEQLLPKVIDLLEQKGLLLYYDLVESTFDKTRLPCRKFEAMDHFQKCFAIIKLKKELADGRVQKDWKAIRVDFVMPPVDNFAFALLGWTGSRQFERDLRRFARHERKMLLDRHALYDKTKKIFLPAKTEEDIFAHLGLDYIPPWQRNA

SEQ ID NO: 371 - protein, 362 aa, Artificial Sequence
  Modified TdT Sequence
MENLYFQGTVSQYACQRRTTMENHNQIFTDAFAILAENAEFNESEGPALAFRRAASLLKSLPHAISSSKDLEGLPCLGDQTKAVIEDILEYGQCSKVQDVLCDDRYQTIKLFTSVFGVGLKTAEKWYRKGFHSLEEVQADKSIQFTKMQKAGFLYYDDISAAVCKAEADAIGHIVEETVRLIAPDAIVTLTGGFRRGKECGHDVDFLITTPEMGKEQLLPDVINLLEKKGLLLYYDLVESTFDKTRLPCRKFEAMDHFQKCFAIIKLKKERAAGRVQKDWKAIRVDFVMPPIDNFAFALLGWTGSRQFERDLRRFARHERKMLLDRHALYDKTKKIFLPAKTEEDIFAHLGLDYIPPWQRNA

SEQ ID NO: 372 - protein, 362 aa, Artificial Sequence
  Modified TdT Sequence
MENLYFQGTVSQYACQRRTTMENHNQIFTDAFAILAENAEFNESEGPALAFRRAASLLKSLPHAISSLKDLEGLPCLGDQTKAVIEDILEYGQCSKVQDVLCDDRYQTIKLFTSVFGVGLKTAEKWYRKGFHSLEEVQADKAIQFTKMQKAGFLYYDDISAAVCKAEADAIGQIVEETVRLIAPDAIVTLTGGFRRGKEIGHDVDFIITTPEMGKEQLLPKVINLLEKKGLLLYYDLVESTFDKTRLPCRKFEAMDHFQKCFAIIKLKKELAAGRVQKDWKAIRVDFVMPPADNFAFALLGWTGSRQFERDLRRFARHERKMLLDRHALYDKTKKIFLPAKTEEDIFAHLGLDYIPPWQRNA

SEQ ID NO: 373 - protein, 362 aa, Artificial Sequence
  Modified TdT Sequence
MENLYFQGTVSQYACQRRTTMENHNQIFTDAFAILAERAEFNESESPCLAFRRAASLLKSLPHAISSSKDLEGLPCLGDQTKAVIEDILEYGQCSKVQDVLCDDRYQTIKLFTSVFGVGLKTAEKWYRKGFHTLEEVQADKAIHFTKMQKAGFLYYDDISAAVCKAEADAIGQIVEETVRLIAPDAIVTLTGGFRRGKEIGHDVDFLITTPEMGKEQLLPRVINLLEKKGLLLYYDLVESTFDKTRLPCRKFEAMDHFQKCFAIIKLKKELAAGRVQKDWKAIRVDFVMPPVDNFAFALLGWTGSRQFERDLRRFARHERKMLLDRHALYDKTKKIFLPAKTEEDIFAHLGLDYIPPWQRNA

SEQ ID NO: 374 - protein, 362 aa, Artificial Sequence
  Modified TdT Sequence
MENLYFQGTVSQYACQRRTTMENHNQIFTDAFAILAENAEFNESEGPCLAFRRAASLLKSLPHAISSSKDLEGLPCLGDQTKAVIEDILEYGQCSKVQDVLCDDRYQTIKLFTSVFGVGLKTAEKWYRKGFHSLEEVQANKAIHFTKMQKAGFLYYDDISAAVCKAEADAIGQIVEETVRLIAPDAIVTLTGGFRRGKECGHDVDFLITTPEAGKEQLLPKVINLWEKKGLLLYYDLVESTFDKTRLPCRKFEAMDHFQKCFAIIKLKKELAAGRVQKDWKAIRVDFVMPPIDNFAFALLGWTGSRQFERDLRRFARHERKMLLDRHALYDKTKKIFLPAKTEEDIFAHLGLDYIPPWQRNA

SEQ ID NO: 375 - protein, 362 aa, Artificial Sequence
  Modified TdT Sequence
MENLYFQGTVSQYACQRRTTMENHNQIFTDAFAILAENAEFNESEGPALAFLRAASLLKSLPHAISSSKDLEGLPCLGDQTKAVIEDILEYGQCSKVQDVLCDDRYQTIKLFTSVFGVGLKTAEKWYRKGFHSLEEVQADKAIQFTKMQKAGFLYYDDISAAVCKAEADAIGQIVEETVRLIAPDAIVTLTGGFRRGKEIGHDVDFLITTPEMGKEQLLPKVINLLEQKGLLLYYDLVESTFDITRLPCRKFEAMDHFQKCFAIIKLKKELAAGRVQKDWKAIRVDFVMPPVDNFAFALLGWTGSRQFERDLRRFARHERKMLLDRHALYDKTKKIFLPAKTEEDIFAHLGLDYIPPWQRNA

SEQ ID NO: 376 - protein, 362 aa, Artificial Sequence
  Modified TdT Sequence
MENLYFQGTVSQYACQRRTTMENHNQIFTDAFAILAENAEFNESEGPALAFRRAASLLKSLPHAISSSKDLEGLPCLGDQTKAVIEDILEYGQCSKVQDVLCDDRYQTIKLFTSVFGVGLKTAEKWYRKGFHSLEEVQADKAIQFTKMQRAGFLYYDDISAAVCKAEADAIGQIVEETVRLIAPDAIVTLTGGFRRGKEIGHDVDFLITTPEMGKEQLLPKVINLLEKKGLLLYYHLVESTFDKTRLPCRKFEAMDHFQKCWAIIKLKKELAAGRVQKDWKAIRVDFVMPPVDNFAFALLGWTGSRQFERDLRRFARHERKMLLDRHALYDRTKKIFLPAKTEEDIFAHLGLDYIPPWQRNA

SEQ ID NO: 377 - protein, 362 aa, Artificial Sequence
  Modified TdT Sequence
MENLYFQGTVSQYACQRRTTMENHNQIFTDAFAILAENAEFRESEGPALAFRRAASLLKSLPHAISSSKDLEGLPCLGDQTKAVIEDILEYGQCSKVQDVLCDDRYQTIKLFTSVFGVGLKTAEKWYRKGFHSLEEVQADKAIQFTKMQKAGFLYYDDISAAVCKAEADAIGQIVEETVRLIAPDAIVTLTGGFRRGKEIGHDVDFLITTPEMGKEQLLPKVIDLLEKKGLLLYYDLVESTFDKTRLPCRKFEAMDHFQKCFAILKLKKELAAGRVQKDWKAIRVDFVMPPVDNFAFALLGWTGSRQFERDLRRFARHERKMLLDRHALYDKTKKIFLPAKTEEDIFAHLGLDYIPPWQRNA

SEQ ID NO: 378 - protein, 362 aa, Artificial Sequence
  Modified TdT Sequence
MENLYFQGTVSQYACQRRTTMENHNQIFTDAFAILAENAEFNENEGPALAFRRAASLLKSLPHAISSSKDLEGLPCLGDQTKAVIEDILEYGQCSKVQDVLCDDRYQTIKLFTSVFGVGLKTAEKWYRKGFHSLEEVQADKAIQFTKMQKAGFLYYDDISAAVCKAEADAIGQIVEETVRKIAPDAIVTLTGGFRRGKECGHDVDFLITTPEMGKEQLLPKVMNLLEKKGLLLYYDLVESTFDKTRLPCRKFEAMDHFQKCFAIIKLKKELAAGRVQKDWKAIRVDFVMPPIDNFAFALLGWTGSRQFERDLRRFARHERKMLLDRHALYDKTKKIFLPAKTEEDIFAHLGLDYIPPWQRNA

SEQ ID NO: 379 - protein, 362 aa, Artificial Sequence
  Modified TdT Sequence
MENLYFQGTVSQYACQRRTTMENHNQIFTDAFAILAENAEFNESEGPCLAFRRAASLLKSLPHAISSSKDLEGLPCLGDQTKAVIEDILEYGQCSKVQDVLCDDRYQTIKLFTSVFGVGLKTAEKWYRKGFHSLEEVQADKAIHFTKMQRAGFLYYDDISAAVCKAEADAIGQIVEETVRLIAPDAIVALTGGFRRGKEIGHDVDFLITTPEMGKEQLLPRLINLLEKKGLLLYYDLVESTFDKTRLPCRKFEAMDHFQKCFAIIKLKKELAAGRVQKDWKAIRVDFVMPPVDNFAFALLGWTGSRQFERDLRRFARHERKMLLDRHALYDKTKKIFLPAKTEEDIFAHLGLDYIPPWQRNA

SEQ ID NO: 380 - protein, 362 aa, Artificial Sequence
  Modified TdT Sequence
MENLYFQGTVSQYACQRRTTMENHNQLFTDAFAILAENAEFNESEGPALAFRRAASLLKSLPHAISSSKDLEGLPCLGDQTKAVIEEILEYGQCSKVQDVLCDDRYQTIKLFTSVFGVGLKTAEKWYRKGFHSLEEVQADKAIQFTKMQKAGFLYYDDISAAVCKAEADAIGQIVEETVRLIAPDAIVTLTGGFRRGKECGHDVDFLITTPEMGKEQLLPDVINLLEKKGLLLYYDLVESTFDKTRLPCRRFEAMDHFQKCFAIIKLKKELAAGRVQKDWKAIRVDFVMPPIDNFAFALLGWTGSRQFERDLRRFARHERKMLLDRHALYDKTKKIFLPAKTEEDIFAHLGLDYIPPWQRNA

SEQ ID NO: 381 - protein, 362 aa, Artificial Sequence
  Modified TdT Sequence
MENLYFQGTVSQYACQRRTTMENHNQIFTDAFAILAENAEFNESEGPCLAFRRAASLLKSLPHAISRSKDLEGLPCLGDQTKAVIEDILEYGQCSKVQDVLCDDRYQTIKQFTSVFGVGLKTAEKWYRKGFHSLEEVQADKAIHFSKMQKAGFLYYDDISAAVCKAEADAIGQIVEETVRLIAPDAIVTLTGGFRRGKECGHDVDFLITTPEMGKEQLLPKVINLWEKKGLLLYYDLVESTFDKTRLPCRKFEAMDHFQKCFAIIKLKKELAAGRVQKDWKAIRVDFVMPPVDNFAFALLGWTGSRQFERDLRRFARHERKMLLDRHALYDKTKKIFLPAKTEEDIFAHLGLDYIPPWQRNA

SEQ ID NO: 382 - protein, 362 aa, Artificial Sequence
  Modified TdT Sequence
MENLYFQGTVSQYACQRRTTMENHNQIFTDAFAILAENAEFNESEGPALAFLRAASLLKSLPHAISSLKDLEGLPCLGDQTKAVIEDILEYGQCSKVQDVLCDDRYQTIKLFTSVFGVGLKTAEKWYRKGFHSLEEVQADKAIQFTKMQKAGFLYYDDISAAVCKAEADAIGQIVEETVRLIAPDAIVTLTGGFRRGKEIGHDVDFLITTPEMGKEQLLPKVINLLEKKGLLLYYDLVESTFDKTRLPCRKFEAMDHFQKCFAIIKLKKELAAGRVQKDWKAIRVDFVMPPVDNFAFALLGWTGSRQFERDLRRFARHERKMLLDRHALYDKTKKIFLPAKSEEDIFAHLGLDYIPPWQRNA

SEQ ID NO: 383 - protein, 362 aa, Artificial Sequence
  Modified TdT Sequence
MENLYFQGTVSQYACQRRTTMENHNQIFTDAFAILAENAEFNESEGPALAFRRAASLLKSLPHAISSLKDLEGLPCLGDQTKAVIEDILEYGQCSKVQDVLCDDRYQTIKLFTSVFGVGLKTAEKWYRKGFHSLEEVQADKAIQFTKMQKAGFLYYDDISAAVCKAEADAIGQIVEETVRKIAPDAIVTLTGGFRRGKECGHDVDFIITTPEMGKEQLLPDVINLLEKKGLLLYYDLVESTFDKTRLPCRKFEAMDHFQKCFAIIKLKKELAAGRVQKDWKAIRVDFVMPPIDNFAFALLGWTGSRQFERDLRRFARHERKMLLDRHALYDKTKKIFLPAKTEEDIFAHLGLEYIPPWQRNA

SEQ ID NO: 384 - protein, 362 aa, Artificial Sequence
  Modified TdT Sequence
MENLYFQGTVSQYACQRRTTMENHNQIFTDAFAILAENAEFNENEGPALAFRRAASLLKSLPHAISSSKDLEGLPCLGDQTKAVIEDILEYGQCSKVQDVLCDDRYQTIKLFTSVFGVGLKTAEKWYRKGFHSLEEVQADKAIQFTKMQKAGFLYYDDISAAVCKAEADAIGCIVEETVHLIAPDAIVTLTGGFRRGKEIGHDVDFLITTPEMGKEQLLPKVINLLEKKGLLLYYDLVESTFDKTRLPCRKFEAMDHFQKCFAIIKLKKELAAGRVQKDWKAIRVDFVMPPVDNFAFALLGWTGSRQFERDLRRFARHERKMLLDRHALYDKTKKIFLPAKTEEEIFAHLGLDYIPPWQRNA

SEQ ID NO: 385 - protein, 362 aa, Artificial Sequence
  Modified TdT Sequence
MENLYFQGTVSQYACQRRTTMENHNQIFTDAFAILAENAEFNESEGPALAFRRAASLLKSLPHAISSSKDLEGLPCLGDQTKAVIEDILEYGQCSKVQDVLCDDRYQTIKLFTSVFGVGLKTAEKWYRKGFHSLEEVQADKAIQFTKMQKAGFLYYDDISAAVCKAEADAIGQIVEETVRLIAPDAIVTLTGGFRRGKEIGHDVDFLITTPEMGKEQLLPKLINLLEQKGLLLYYDLVESTFDKTRLPCRKFEAMDHFQKCFAIIKLKKELAAGRVQKDWKAIRVDFVMPPIDNFAFALLGWTGSRQFERDLRRFARHERKMLLDRHALYDKTKKIFLPAKTEEDIFAHLGLDYIPPWQRNA

SEQ ID NO: 386 - protein, 362 aa, Artificial Sequence
  Modified TdT Sequence
MENLYFQGTVSQYACQRRTTMENHNQIFTDAFAILAENAEFNESEGPCLAFRRAASLLKSLPHAIISSKDLEGLPCLGDQTKAVIEDILEYGQCSKVQDVLCDDRYQTIKLFTSVFGVGLKTAEKWYRKGFHSLEEVQADKAIHFTKMQKAGFLYYDDISAAVCKAEADAIGQIVEETVRLIAPDAIVTLTGGFRRGKECGHDVDFLITTPEMGKEQLLPKVINLWEKKGLLLYYDLVESTFDKTRLPCRKFEAMDNFQKCFAIIKLKKELAAGRVQKDWKAIRVDFVMPPVDNYAFALLGWTGSRQFERDLRRFARHERKMLLDRHALYDKTKKIFLPAKTEEDIFAHLGLDYIPPWQRNA

SEQ ID NO: 387 - protein, 362 aa, Artificial Sequence
  Modified TdT Sequence
MENLYFQGTVSQYACQRRTTMENHNQIFTDAFAILAENAEFNESEGPALAFRRAASLLKSLPHAISSSKDLEGLPCLGDQTKGVIEDILEYGQCSKVQDVLCDDRYQTIKLFTSVFGVGLKTAEKWYRKGFHSLEEVQADKAIQFTKMQKAGFLYYDDISAAVCKAEADAIGQIVEETVRLIAPDAIVTLTGGFRRGKECGHDVDFLITTPEQGKEQLLPDVINLLEKKELLLYYDLVESTFDKTRLPCRKFEAMDHFQKCFAIIKLKKELAAGRVQKDWKAIRVDFVMPPIDNFAFTLLGWTGSRQFERDLRRFARHERKMLLDRHALYDKTKKIFLPAKTEEDIFAHLGLDYIPPWQRNA

SEQ ID NO: 388 - protein, 362 aa, Artificial Sequence
  Modified TdT Sequence
MENLYFQGTVSQYACQRRTTMENRNQIFTDAFAILAENAEFNENEGPALAFRRAASLLKSLPHAISSSKDLEGLPCLGDQTKAVIEDILEYGQCSKVQEVLCDDRYQTIKLFTSVFGVGLKTAEKWYRKGFHSLEEVQADKAIQFTKMQKAGFLYYDDISAAVCKAEADAIGQIVEETVRLIAPDAIVTLTGGFRRGKECGHDVDFLITTPEMGKEQLLPDVINLLEKKGLLLYYDLVESTFDKTRLPCRKFEAMDHFQKCFAIIKLKKELAAGRVQKDWKAIRVDFVMPPIDNFAFALLGWTGSRQFERDLRRFARHERKMLLDRHALYDKTKKIFLPAKTEEDIFAHLGLDYIPPWQRNA

SEQ ID NO: 389 - protein, 362 aa, Artificial Sequence
  Modified TdT Sequence
MENLYFQGTVSQYACQRRTTMENHNQIFTDAFAILAENAEFNESEGPCLAFRRAASLLKSLPHAISRSKDLEGLPCLGDQTKCVIEDILEYGQCSKVQDVLCDDRYQTIKLFTSVFGVGLKTAEKWYRKGFHSLEEVQADKAIHFTKMQKAGFLYYDDISAAVCKAEADAIGQIVEETVRLIAPDAIVTLTGGFRRGKNCGHDVDFLITTPEMGKEQLLPKVINLWEKKGLLLYYDLVESTFDKTRLPCRKFEAMDHFQKCFAIIKLKKELAAGRVQKDWKAIRVDFVMPPVDNFAFALLGWTGSRQFERDLRRFARHERKMLLDRHALYDKTKKIFLPAKTEEDIFAHLGLDYIPPWQRNA

SEQ ID NO: 390 - protein, 362 aa, Artificial Sequence
  Modified TdT Sequence
MENLYFQGTVSQYACQRRTTMENHNQIFTDAFAILAENAEFNESEGPCLAFRRAASLLKSLPHAISSSKDLEGLPCLGDQTKAVIEDILEYGQCSKVQDVLCDDRYQTIKQFTSVFGVGLKTAEKWYRKGFHSLEEVQADKAIHFTKMQKAGFLYYDDISAAVCKAEADAIGQIVEETVRLITPDAIVTLTGGFRRGKECGHDVDFLITTPEMGKEQLLPKVINLWEKKGLLLYYDLVESTFDKTRLPCRKFEAMDHFQKCFAIIKLKKELAAGRVQKDWKAIRVDFVMPPVDNYAFALLGWTGSRQFERDLRRFARHERKMLLDRHALYDKTKKIFLPAKTEEDIFAHLGLDYIPPWQRNA

SEQ ID NO: 391 - protein, 362 aa, Artificial Sequence
  Modified TdT Sequence
MENLYFQGTVSQYACQRRTTMENHNQIFTDAFAILAENAEFNESEGPALAFRRAASLLKSLPHAISSSKDLEGLPCLGDQTKAVIEDILEYGQCSKVQDVLCDDRYQTIKLFTSVFGVGLKTAEKWYRKGFHSLEEVQADKAIQFTKMQKAGFLYYDDISAAVCKAEADAIGQIVEETVRLIAPDAIVTLTGGFRRGKEIGHDVDFLITTPEMGKEQLLPKVINLLEKKGLLLYYDLVESTFDKTRLPCRKFEAMDHFQKCFAIIKLKKELAAGRVQKDWKAIRVDFVMPPVDNFAFALLGWTGSRQFERDLRRFARHERKMLLDRHALYDKTKKIFLPAKTEEDIFAHLGLDYIPPWQRNA

SEQ ID NO: 392 - protein, 362 aa, Artificial Sequence
  Modified TdT Sequence
MENLYFQGTVSQYACQRRTTMENHNQIFTDAFAILAENAEFNESEGPALAFRRAASLLKSLPHAISSSKDLEGLPCLGDQTKAVIEDILEYGQCSKVQDVLCDDRYQTIKLFTSVFGVGLKTAEKWYRKGFHSLEEVQADKAIHFTKMQKAGFLYYDDISAAVCKAEADAIGQIVEETVRLIAPDAIVTLTGGFRRGKECGHDVDFLITTPEMGKEQLLPKVINLLEKKGLLLYYDLVESTFDKTRLPCRKFEAMDHFQKCFAIIKLKKELAAGRVQKDWKAIRVDFVMPPVDNFAFALLGWTGSRQFERDLRRFARHERKMLLDRHALYDKTKKIFLPAKSEEDIFAHLGLDYIPPWQRNA

SEQ ID NO: 393 - protein, 362 aa, Artificial Sequence
  Modified TdT Sequence
MENLYFQGTVSQYACQRRTTMENHNQIFTDAFAILAENAEFNESEGPALAFRRAASLLKSLPHAISSSKDLEGLPCLGDQTKAVIEDIYEYGQCSKVQDVLCDDRYQTIKLFTSVFGVGLKTAEKWYRKGFHSLEEVQADKAIQFTKMQKAGFLYYDDISAAVCKAEADAIGQIVEETVRLIAPDAIVTLTGGFRRGKECGHDVDFLITTPEMGKEQLLPDVMNLLEKKGLLLYYDLVESTFDKTRLPCRKFEAMDHFQKCFAIIRLKKELAAGRVQKDWKAIRVDFVMPPIDNFAFALLGWTGSRQFERDLRRFARHERKMLLDRHALYDKTKKIFLPAKTEEDIFAHLGLDYIPPWQRNA

SEQ ID NO: 394 - protein, 362 aa, Artificial Sequence
  Modified TdT Sequence
MENLYFQGTVSQYACQRRTTMENHNQIFTDAFAILAENAEFNESEGPALAFRRAASLLKSLPHAISSSKDLEGLPCLGDQTKAVIEDILEYGQCSKVQDVLCDDRYQTIKLFTSVFGVGLKTAEKWYRMGFHTLEEVQADKAIQFTKMQKAGFLYYDDISAAVCKAEADAIGQIVEETVRLIAPDAIVTLTGGFRRGKEIGHDVDFLITTPEMGKEQLLPKVINLLEQKGLLLYYDLVESTFDKTRLPCRKFEAMDHFQKCFAIIKLKKELAAGRVQKDWKAIRVDFVMPPVDNFAFALLGWTGSRQFERDLRRFARHERKMLLDRHALYDRTKKIFLPAKTEEDIFAHLGLDYIPPWQRNA

SEQ ID NO: 395 - protein, 362 aa, Artificial Sequence
  Modified TdT Sequence
MENLYFQGTVSQYACQRRTTMENHNQIFTDAFAILAENAEFNENEGPALAFRRAASLLKSLPHAISSSKDLEGLPCLGDQTKAVIEDILEYGQCSKVQDVLCDDRYQTIKLFTSVFGVGLKTAEKWYRKGFHSLEEVQADKAIQFTKMQKAGFLYYDDISAAVCKAEADAIGQIVEETVRKIAPDAIVTLTGGFRRGKEIGHDVDFLITTPEAGKEQLLPKVINLLEKKGLLLYYDLVESTFDKTRLPCRKFEAMDHFQKCFAIIKLKKELAAGRVQKDWKAIRVDFVMPPVDNFAFALLGWTGSRQFERDLRRFARHERKMLLDRHALYDKTKKIFLPAKTEEDIFAHLGLDYIPPWQRNA

SEQ ID NO: 396 - protein, 362 aa, Artificial Sequence
  Modified TdT Sequence
MENLYFQGTVSQYACQRRTTMENHNQIFTDAFAILAERAEFNESEGPCLAFRRAASLLKSLPHAISSSKDLEGLPCLGDQTKAVIEDILEYGQCSKVQDVLCDDRYKTIKLFTSVFGVGLKTAEKWYRKGFHSLEEVQADKAIHFTKMQKAGFLYYDDISAAVCKAEADAIGQVVEETVRLIAPDAIVTLTGGFRRGKEIGHDVDFLITTPEMGKEQLLPRVINLLEKKGLLLYYDLVESTFDKTRLPCRKFEAMDHFQKCFAIIKLKKELAAGRVQKDWKAIRVDFVMPPVDNFAFALLGWTGSRQFERDLRRFARHERKMLLDRHALYDKTKKIFLPAKTEEDIFAHLGLDYIPPWQRNA

SEQ ID NO: 397 - protein, 362 aa, Artificial Sequence
  Modified TdT Sequence
MENLYFQGTVSQYACQRRTTMENHNQIFTDAFAILAENAEFNESEGPALAFRRAASLLKSLPHAISSSKDLEGLPCLGDQTKAVIEDILEYGQCSKVQDVLCDDRYQTIKLFTSVFGVGLKTAEKWYRKGFHSLEEVQADRAIHFTKMQKAGFLYYDDISAAVCKAEADAIGQIVEETVRLIAPDAIVTLTGGFRRGKEIGHDVDFLITTPEMGKEQLLPKLINLLEKKGLLLYYDLVESTFDKTRLPCRKFEAMDHFQKCFAIIKLKKELAAGRVQKDWKAIRVDFVMPPVDNFAFALLGWTGSRQFERDLRRFARHERKMLLDRHALYDKTKKIFLPAKTEEDIFAHLGLDYIPPWQRNA

SEQ ID NO: 398 - protein, 362 aa, Artificial Sequence
  Modified TdT Sequence
MENLYFQGTVSQYACQRRTTMENHNQIFTDAFAILAENAEFNESEGPALAFRRAASLLKSLPHAISSSKDLEGLPCLGDQTKAVIEDILEYGQCSKVQDVLCDDRYQTIKLFTSVFGVGLKTAEKWYRKGFHTLEEVQADKAIQFTKMQKAGFLYYDDISAAVCKAEADAIGQIVEETVRLIAPDAIVTLTGGFRRGKEIGHDVDFLITTPEMGKEQLLPDVINLLEKKGLLLYYDLVESTFDKTRLPCRKFEAMDHFQKCFAIIKLKKELAAGRVQKDWKAIRVDFVMPPVDNFAFALLGWTGSRQFERDLRRFARHERKMLLDRHALYDKTKKIFLPAKTEEEIFAHLGLDYIPPWQRNA

SEQ ID NO: 399 - protein, 362 aa, Artificial Sequence
  Modified TdT Sequence
MENLYFQGTVSQYACQRRTTMENHNQIFTDAFAILAENAEFNENEGPALAFRRAASLLKSLPHAISSSKDLEGLPCLGDQTKAVIEDILEYGQCSKVQDVLCDDRYQTIKLFTSVFGVGLKTAEKWYRKGFHSLEEVQADKAIQFTKMQKAGFLYYDDISAAVCKAEADAIGQIVEETVRLIAPDAIVTLTGGFRRGKEIGHDVDFLITTPEMGKEQLLPKVIDLLEQKGLLLYYDLVESTFDKTRLPCRKFEAMDHFQKCFAIIKLKKEQAAGRVQKDWKAIRVDFVMPPVDNFAFALLGWTGSRQFERDLRRFARHERKMLLDRHALYDKTKKIFLPAKTEEDIFAHLGLDYIPPWQRNA

SEQ ID NO: 400 - protein, 362 aa, Artificial Sequence
  Modified TdT Sequence
MENLYFQGTVSQYACQRRTTMENHNQIFTDAFAILAENAEFNESEGPCLAFLRAASLLKSLPHAISSSKDLEGLPCLGDQTKAVIEDILEYGQCSKVQDVLCDDRYQTIKLFTSVFGVGLKTAEKWYRKGFHSLEEVQADKAIHFTKMQKAGFLYYDDISAAVCKAEADAIGQIVEETVRLIAPDAIVTLTGGFRRGKEIGHDVDFLITTPEMGKEQLLPRVINLLEKKGLLLYYDLVESTFDKTRLPCRKFEAMDHFQKCFAIIKLKKELAAGRVQKDWKAIRVDFVLPPIDNFAFALLGWTGSRQFERDLRRFARHERKMLLDRHALYDKTKKIFLPAKTEEDIFAHLGLDYIPPWQRNA

SEQ ID NO: 401 - protein, 362 aa, Artificial Sequence
  Modified TdT Sequence
MENLYFQGTVSQYACQRRTTMENHNQIFTDAFAILAENAEFNESEGPALAFRRAASLLKSLPHAISSSKDLEGLPCLGDQTKAVIEDIYEYGQCSKVQDVLCDDRYQTIKLFTSVFGVGLKTAEKWYRKGFHSLEEVQADRAIQFTKMQKAGFLYYDDISAAVCKAEADAIGQIVEETVRLIAPDAIVTLTGGFRRGKECGHDVDFLITTAEMGKEQLLPDVINLLEKKGLLLYYDLVESTFDKTRLPCRKFEAMDHFQKCFAIIKLKKELAAGRVQKDWKAIRVDFVMPPIDNFAFALLGWTGSRQFERDLRRFARHERKMLLDRHALYDKTKKIFLPAKTEEDIFAHLGLEYIPPWQRNA

SEQ ID NO: 402 - protein, 362 aa, Artificial Sequence
  Modified TdT Sequence
MENLYFQGTVSQYACQRRTTMENHNQIFTDAFAILAENAEFNESEGPCLAFLRAASLLKSLPHAISSSKDLEGLPCLGDQTKAVIEDILEYGQCSKVQDVLCDDRYQTIKLFTSVFGVGLKTAEKWYRKGFHSLEEVQADKAIHFTKMQRAGFLYYDDISAAVCKAEADAIGQIVEETVRLIAPDAIVTLTGGFRRGKEIGHDVDFLITTPEMGKEQLLPKVINLLEKKGLLLYYDLVESTFDKTRLPCRKFEAMDHFQKCFAIIKLKKELAAGRVQKDWKAIRVDFVMPPVDNFAFALLGWTGSRQFERDLRRFARHERKMLLDRHALYDKTKKIFLPAKTEEDIFAHLGLDYIPPWQRNA

SEQ ID NO: 403 - protein, 362 aa, Artificial Sequence
  Modified TdT Sequence
MENLYFQGTVSQYACQRRTTMENHNQIFTDAFAILAENAEFNESEGPCLAFRRAASLLKSLPHAISCSKDLEGLPCLGDQTKAVIEDILEYGQCSKVQDVLCDDRYQTIKLFTSVFGVGLKTAEKWYRKGFHSLEEVQADKAIHFTKMQKAGFLYYDDISAAVCKAEADAIGQIVEETVRLIAPDAIVTLTGGFRRGKECGHDVDFLITTPEMGKEQLLPKVIRLLEKKGLLLYYDLVESTFDKTRLPCRKFEAMDHFQKCFAIIKLKKELAAGRVQKDWKAIRVDFVMPPVDNFAFALLGWTGSRQFERDLRRFARHERKMLLDRHALYDKTKKIFLPAKTEEDIFAHLGLDYIPPWQRNA

SEQ ID NO: 404 - protein, 362 aa, Artificial Sequence
  Modified TdT Sequence
MENLYFQGTVSQYACQRRTTMENHNQIFTDAFAILAENAEFNESEGPCLAFLRAASLLKSLPHAISSSKDLEGLPCLGDQTKAVIEDILEYGQCSKAQDVLCDDRYQTIKLFTSVFGVGLKTAEKWYRKGFHSLEEVQADKAIHFTKMQKAGFLYYDDISAAVCKAEADAIGQIVEETVRLIAPDAIVTLTGGFRRGKECGHDVDFLITTPEMGKEQLLPKVINLWEQKGLLLYYDLVESTFDKTRLPCRKFEAMDHFQKCFAIIKLKKELAAGRVQKDWKAIRVDFVMPPVDNFAFALLGWTGSRQFERDLRRFARHERKMLLDRHALYDKTKKIFLPAKTEEDIFAHLGLDYIPPWQRNA

SEQ ID NO: 405 - protein, 362 aa, Artificial Sequence
  Modified TdT Sequence
MENLYFQGTVSQYACQRRTTMENHNQIFTDAFAILAENAEFNESEGPALAFRRAASLLKSLPHAILSSKDLEGLPCLGDQTKGVIEDILEYGQCSKVQDVLCDDRYQTIKLFTSVFGVGLKTAEKWYRKGFHSLEEVQADKAIQFTKMQKAGFLYYDDISAAVCKAEADAIGQIVEETVRLIAPDALVTLTGGFRRGKECGHDVDFLITTPEMGKEQLLPDVINLLEKKGLLLYYDLVESTFDKTRLPCRKFEAMDHFQKCFAIIKLKKERAAGRVQKDWKAIRVDFVMPPIDNFAFALLGWTGSRQFERDLRRFARHERKMLLDRHALYDKTKKIFLPAKTEEDIFAHLGLDYIPPWQRNA

SEQ ID NO: 406 - protein, 362 aa, Artificial Sequence
  Modified TdT Sequence
MENLYFQGTVSQYACQRRTTMENHNQIFTDAFAILAENAEFNESEGPCLAFRRAASLLKSLPHAISSSKDLEGLPCLGEQTKAVIEDILEYGQCSKVQDVLCDDRYQTIKLFTSVFGVGLKTAEKWYRKGFHSLEEVQADKSIQFTKMQKAGFLYYDDISAAVCKAEADAIGQIVEETVRLIAPDAIVTLTGGFRRGKECGHDVDFLITTPEMGKEQLLPDVINLLEKKGLLLYYDLVESTFDKTRLPCRKFEAMDHFQKCFAIIKLKKELAAGRVQKDWKAIRVDFVMPPIDNFAFALLGWTGSRQFERDLRRFARHERKMLLDRHALYDKTKKIFLPAKTEEDIFAHLGLDYIPPWQRNA

SEQ ID NO: 407 - protein, 362 aa, Artificial Sequence
  Modified TdT Sequence
MENLYFQGTVSQYACQRRTTMENHNQIFTDAFAILAENAEFNESEGPCLAFRRAASLLKSLPHAISSSKDLEGLPCLGDQTKAVIEDILEYGQCSKVQDVLCDDRYQTIKLFTSVFGVGLKTAEKWYRKGFHSLEEVQADKAIQFTKMQKAGFLYYDDISAAVCKAEADAIGQIVEETVRLIAPDAIVTLTGGFRRGKEIGHDVDFLITTPEMGREQLLPRVINLLEQKGLLLYYDLVESTFDKTRLPCRKFEAMDHFQKCFAIIKLKKELAAGRVQKDWKAIRVDFVMPPVDNFAFALLGWTGSRQFERDLRRFARHERKMLLDRHALYDKTKKIFLPAKTEEDIFAHLGLDYIPPWQRNA

SEQ ID NO: 408 - protein, 362 aa, Artificial Sequence
  Modified TdT Sequence
MENLYFQGTVSQYACQRRTTMENHNQIFTDAFAILAENAEFNESEGPALAFRRAASLLKSLPHAISSSKDLEGLPCLGDQTKAVIEDILEYGQCSKVQDVLCDDRYQTIKLFTSVFGVGLKTAEKWYRKGFHSLEEVQADKAIHFTKMQKAGFLYYDDISAAVCKAEADAIGCIVEETVRLIAPDAIVTLTGGFRRGKEIGHDVDFLITTPEMGKEQLLPRVINLLEKKGLLLYYDLVESTFDKTRLPCRKFEAMDHFQKCFAIIKLKKELAAGRVQKDWKAIRVDFVMPPVDNFAFALLGWTGSRQFERDLRRFARHERKMLLDRHALYDKTKKIFLPAKTEEEIFAHLGLDYIPPWQRNA

SEQ ID NO: 409 - protein, 362 aa, Artificial Sequence
  Modified TdT Sequence
MENLYFQGTVSQYACQRRTTMENHNQIFTDAFAILAENAEFNESEGPCLAFRRAASLLKSLPHAISSSKDLEGLPCLGDQTKAVIEDILEYGQCSKVQDVLCDDRYQTIKLFTSVFGVGLKTAEKWYRKGFHSLEEVQADKAIHFTKMQKAGFLYYDDISAAVCKAEADAIGQIVEETVRLIAPDAIVTLTGGFRRGKECGHDVDFLITTPEMGKEQLLPKVINLLEKKGLLLYYDLVESTFDKTRLPCRKFEAMDNFQKCFAIIKLKAELAAGRVQKDWKAIRVDFVMPPVDNFAFALLGWTGSRQFERDLRRFARHERKMLLDRHALYDKTKKIFLPAKTEEDIFAHLGLDYIPPWQRNA

SEQ ID NO: 410 - protein, 362 aa, Artificial Sequence
  Modified TdT Sequence
MENLYFQGTVSQYACQRRTTMENHNQIFTDAFAILAENAEFNENEGPALAFRRAASLLKSLPHAILSSKDLEGLPCLGDQTKAVIEDILEYGQCSKVQDVLCDDRYQTIKLFTSVFGVGLKTAEKWYRKGFHSLEEVQADKAIQFTKMQKAGFLYYDDISAAVCKAEADAIGQIVEETVRLIAPDAIVTLTGGFRRGKECGHDVDFLITTPEMGKEQLLPDVINLLEKKGLLLYYDLVESTFDKTRLPCRKFEAMDHFQKCFAIIKLKKELAAGRVQKDWKAIRVDFVMPPIDNFAFALLGWTGSRQFERDLRRFARHERKMLLDRHALYDKTKRIFLPAKTEEDIFAHLGLDYIPPWQRNA

SEQ ID NO: 411 - protein, 362 aa, Artificial Sequence
  Modified TdT Sequence
MENLYFQGTVSQYACQRRTTMENHNQIFTDAFAILAENAEFNESEGPALAFRRAASLLKSLPHAISSSKDLEGLPCLGDQTKAVIEDILEYGQCSKVQDVLCDDRYQTIKLFTSVFGVGLKTAEKWYRKGFHSLEEVQADKAIQFTKMQKAGFLYYDDISAAVCKAEADAIGQIVEETVRAIAPDAIVTLTGGFRRAKECGHDVDFLITTPEMGKEQLLPDVINLLEKKGLLLYYHLVESTFDKTRLPCRKFEAMDHFQKCFAIIKLNKELAAGRVQKDWKAIRVDFVMPPIDNFAFALLGWTGSRQFERDLRRFARHERKMLLDRHALYDKTKKIFLPAKTEEDIFAHLGLDYIPPWQRNA

SEQ ID NO: 412 - protein, 362 aa, Artificial Sequence
  Modified TdT Sequence
MENLYFQGTVSQYACQRRTTMENHNQIFTDAFAILAENAEFNESEGPCVAFRRAASLLKSLPHAISSSKDLEGLPCLGDQTKAVIEDILEYGQCSKVQDVLCDDRYQTIKLFTSVFGVGLKTAEKWYRKGFHSLEEVQADKAIHFTKMQKAGFLYYDDISAAVCKAEADAIGCIVEETVRLIAPDAIVTLTGGFRRGKEIGHDVDFLITTPEMGKEQLLPKVINLLEKKGLLLYYDLVESTFDKTRLPCRKFEAMDHFQKCFAIIKLKKELAAGRVQKDWKAIRVDFVMPPVDNFAFALLGWTGSRQFERDLRRFARHERKMLLDRHALYDKTKKIFLPAKTEEDIFAHLGLDYIPPWQRNA

SEQ ID NO: 413 - protein, 362 aa, Artificial Sequence
  Modified TdT Sequence
MENLYFQGTVSQYACQRRTTMENHNQIFTDAFAILAENAEFNESEGPCLAFRRAASLLKSLPHAISSSKDLEGLPCLGDQTKAVIEDILEYGQCSKVQDVLCDDRYKTIKLFTSVFGVGLKTAEKWYRKGFHSLEEVQADKAIHFTKMQKAGFLYYDDISAAVCKAEADAIGQIVEETVRGIAPDAIVTLTGGFRRGKEIGHDVDFLITTPEMGKEQLLPKVINLLEKKGLLLYYDLVESTFDKTRLPCRKFEAMDHFQKCFAIIKLKKELAAGRVQKDWKAIRVDFVMPPVDNFAFALLGWTGSRQFERDLRRFARHERKMLLDRHALYDKTKKIFLPAKTEEDIFAHLGLDYIPPWQRNA

SEQ ID NO: 414 - protein, 362 aa, Artificial Sequence
  Modified TdT Sequence
MENLYFQGTVSQYACQRRTTMENHNQIFTDAFAILAENAEFNESEGPCLAFRRAASLLKSLPHAISSSKDLEGLPCLGDQTKAVIEDILEYGQCSKVQDVLCDDRYQTIKLFTSVFGVGLKTAEKWYRKGFHSLEEVQADKAIHFTKMQKAGFLYYDDISAAVCKAEADAIGQIVEETVRLIAPDAIVTLTGGFRRGKEIGHDVDFLITTPEMGKEQLLPKVIDLWEKKGLLLYYDLVESTFDKTRLPCRKFEAMDHFQKCFAIIKLKKQLAAGRVQKDWKAIRVDFVMPPVDNFAFALLGWTGSRQFERDLRRFARHERKMLLDRHALYDKTKKIFLPAKTEEDIFAHLGLDYIPPWQRNA

SEQ ID NO: 415 - protein, 362 aa, Artificial Sequence
  Modified TdT Sequence
MENLYFQGTVSQYACQRRTTMENHNQIFTDAFAILAERAEFNESEGPALAFRRAASLLKSLPHAISSSKDLEGLPCLGDQTKAVIEDILEYGQCSKVQDVLCDDRYQTIKLFTSVFGVGLKTAEKWYRKGFHSLEEVQADKAIHFTKMQKAGFLYYDDISAAVCKAEADAIGQIVEETVRLIAPDAIVTLTGGFRRGKEIGHDVDFLITTPEAGKEQLLPRVINLLEKKGLLLYYDLVESTFDKTRLPCRKFEAMDHFQKCFAIIKLKKELAAGRVQKDWKAIRVDFVMPPVDNFAFALLGWTGSRQFERDLRRFARHERKMLLDRHALYDKTKKIFLPAKTEEDIFAHLGLDYIPPWQRNA

SEQ ID NO: 416 - protein, 362 aa, Artificial Sequence
  Modified TdT Sequence
MENLYFQGTVSQYACQRRTTMENHNQIFTDAFAILAENAEFNESEGPALAFRRAASLLKSLPHAISSSKDLEGLPCLGDQTKAVIEDILEYGQCSKVQDVLCDDRYQTIKLFTSVFGVGLKTAEKWYRKGFHSLEEVQADKAIQFTKMQKAGFLYYDDISAAVCKAEADAIGQIVEETVRLIAPDAIVTLTGGFRRGKECGHDVDFLITTPEAGKEQLLPKVINLLEKKGLLLYYDLVESTFDKTRLPCRKFEAMDHFQKCFAIIKLKKELAAGRVQKDWKAIRVDFVMPPVDNFAFALLGWTGSRQFERDLRRFARHERKMLLDRHALYDKTKKIFLPAKTEEEIFAHLGLDYIPPWQRNA

SEQ ID NO: 417 - protein, 362 aa, Artificial Sequence
  Modified TdT Sequence
MENLYFQGTVSQYACQRRTTMENHNKIFTDAFAILAENAEFNESEGPCLAFRRAASLLKSLPHAISSSKDLEGLPCLGDQTKAVIEDILEYGQCSKVQDVLCDDRYQTIKLFTSVFGVGLKTAEKWYRKGFHSLEEVQADKAIHFTKMQKAGFLYYDDISAAVCKAEADAIGCIVEETVRLIAPDAIVTLTGGFRRGKEIGHDVDFLITTPEMGKEQLLPRVINLLEQKGLLLYYDLVESTFDKTRLPCRKFEAMDHFQKCFAIIKLKKELAAGRVQKDWKAIRVDFVMPPVDNFAFALLGWTGSRQFERDLRRFARHERKMLLDRHALYDKTKKIFLPAKTEEDIFAHLGLDYIPPWQRNA

SEQ ID NO: 418 - protein, 362 aa, Artificial Sequence
  Modified TdT Sequence
MENLYFQGTVSQYACQRRTTMENHNQIFTDAFAILAENAEFNENEVPALAFRRAASLLKSLPHAISSSKDLEGLPCLGDQTKAVIEDILEYGQCSKVQDVLCDDRYQTIKLFTSVFGVGLKTAEKWYRKGFHSLEEVQADKAIQFTKMQKAGFLYYDDISAAVCKAEADAIGQVVEETVRLIAPDAIVTLTGGFRRGKEIGHDVDFLITTPEMGKEQLLPKLINLLEKKGLLLYYDLVESTFDKTRLPCRKFEAMDHFQKCFAIIKLKKELAAGRVQKDWKAIRVDFVMPPVDNFAFALLGWTGSRQFERDLRRFARHERKMLLDRHALYDKTKKIFLPAKTEEDIFAHLGLDYIPPWQRNA

SEQ ID NO: 419 - protein, 362 aa, Artificial Sequence
  Modified TdT Sequence
MENLYFQGTVSQYACQRRTTMENHNQIFTDAFAILAERAEFNENEGPCVAFRRAASLLKSLPHAISSSKDLEGLPCLGDQTKAVIEDILEYGQCSKVQDVLCDDRYQTIKLFTSVFGVGLKTAEKWYRKGFHSLEEVQADKAIQFTKMQKAGFLYYDDISAAVCKAEADAIGQIVEETVRLIAPDAIVTLTGGFRRGKEIGHDVDFLITTPEMGKEQLLPRVINLLEKKGLLLYYDLVESTFDKTRLPCRKFEAMDHFQKCFAIIKLKKELAAGRVQKDWKAIRVDFVMPPVDNFAFALLGWTGSRQFERDLRRFARHERKMLLDRHALYDKTKKIFLPAKTEEDIFAHLGLDYIPPWQRNA

SEQ ID NO: 420 - protein, 362 aa, Artificial Sequence
  Modified TdT Sequence
MENLYFQGTVSQYACQRRTTMENHNQIFTDAFAILAENAEFNESESPCLAFRRAASLLKSLPHAISSSKDLEGLPCLGDQTKAVIEDILEYGQCSKVQDVLCDDRYQTIKLFTSVFGVGLKTAEKWYRKGFHSLEEVQADKAIHFTKMQKAGFLYYDDISAAVCKAEADAIGQIVEETVRLIAPDAIVTLTGGFRRGKEIGHDVDFLITTPEMGKEQLLPRVINLLEKKGLLLYYDLVESTFDKTRLPCRKFEAMDHFQQCFAIIKLKKELAAGRVQKDWKAIRVDFVMPPVDNFAFALLGWTGSRQFERDLRRFARHERKMLLDRHALYDKTKKIFLPAKTEEEIFAHLGLDYIPPWQRNA

SEQ ID NO: 421 - protein, 362 aa, Artificial Sequence
  Modified TdT Sequence
MENLYFQGTVSQYACQRRTTMENHNQIFTDAFAILAENAEFNESEGPCLAFLRAASLLKSLPHAISSSKDLEGLPCLGDQTKAVIEDILEYGQCSKVQDVLCDDRYQTIKLFTSVFGVGLKTAEKWYRKGFHSFEEVQADKAIHFTKMQKAGFLYYDDISAAVCKAEADAIGQIVEETVRLIAPDAIVTLTGGFRRGKECGHDVDFLITTPEMGKEQLLPKVINLWEKKGLLLYYDLVESTFDKTRLPCRKFEAMDHFQKCFAIIKLKKQLAAGRVQKDWKAIRVDFVMPPVDNFAFALLGWTGSRQFERDLRRFARHERKMLLDRHALYDKTKKIFLPAKTEEDIFAHLGLDYIPPWQRNA

SEQ ID NO: 422 - protein, 362 aa, Artificial Sequence
  Modified TdT Sequence
MENLYFQGTVSQYACQRRTTMENHNQIFTDAFAILAENAEFNESEGPALAFRRAASLLKSLPHTISSSKDLEGLPCLGDQTKAVIEDILEYGQCSKVQDVLCDDRYQTIKLFTSVFGVGLKTAEKWYRKGFHSLEEVQADKAIQFTKMQKAGFLYYDDISAAVCKAEADAIGQIVEETVRLIAPDAIVTLTGGFRRGKECGHDVDFLITTPEQGKEQLLPDVINLLEKKGLLLYYDLVESTFDKTRLPCRKFEAMDHFQKCFAIIKLKKELAAGRVQKDWKAIRVDFVMPPADNFAFALLGWTGSRQFERDLRRFARHERKMLLDRHALYDKTKKIFLPAKTEEDIFAHLGLDYIPPWQRNA

SEQ ID NO: 423 - protein, 362 aa, Artificial Sequence
  Modified TdT Sequence
MENLYFQGTVSQYACQRRTTMENHNQIFTDAFAILAENAEFNESEGPALAFRRAASLLKSLPHAISSSKDLEGLPCLGDQTKAVIEDILEYGQCSKVQDVLCDDRYQTIKLFTSVFGVGLKTAEKWYRKGFHSLEEVQADKAIHFTKMQKAGFLYYDDISAAVCKAEADAIGQIVEETVRLIAPDAIVTLTGGFRRGKEIGHDVDFLITTPEMGKEQLLPRVINLWEKKGLLLYYDLVESTFDKTRLPCRKFEAMDHFQQCFAIIKLKKELAAGRVQKDWKAIRVDFVMPPVDNFAFALLGWTGSRQFERDLRRFARHERKMLLDRHALYDKTKKIFLPAKTEEDIFAHLGLDYIPPWQRNA

SEQ ID NO: 424 - protein, 362 aa, Artificial Sequence
  Modified TdT Sequence
MENLYFQGTVSQYACQRRTTMENHNQIFTDAFAILAENAEFNESEGPCLAFRRAASLLKSLPHAISSSKDLEGLPCLGDQTKAVIEDILEYGQCSKVQDVLCDDRYQTIKLFTSVFGVGLKTAEKWYRKGFHSLEEVQADKAIHFTKMQKAGFLYYDDISAAVCKAEADAIGQIVEETVRLIAPDAIVTLTGGFRRGKECGHDVDFLITTPGMGKEQLLPKVINLWEKKGLLLYYDLVESTFDKLRLPCRKFEAMDHFQKCFAIIKLKKELAAGRVQKDWKAIRVDFVMPPVDNFAFALLGWTGSRQFERDLRRFARHERRMLLDRHALYDKTKKIFLPAKTEEDIFAHLGLDYIPPWQRNA

SEQ ID NO: 425 - protein, 362 aa, Artificial Sequence
  Modified TdT Sequence
MENLYFQGTVSQYACQRRTTMENHNQIFTDAFAILAENAEFNESEGPCLAFRRAASLLKSLPHAISSSKDLEGLPCLGDQTKAVIEDILEYGQCSKVQDVLCDDRYQTIKLFTSVFGVGLKTAEKWYRKGFHSLEEVQADKAIQFTKMQKAGFLYYDDISAAVCKAEADAIGQIVEETVRGIAPDAIVTLTGGFRRGKEIGHDVDFLITTPEMGKEQLLPRVINLWEKKGLLLYYDLVESTFDKTRLPCRKFEAMDHFQKCFAIIKLKKELAAGRVQKDWKAIRVDFVMPPVDNFAFALLGWTGSRQFERDLRRFARHERKMLLDRHALYDKTKKIFLPAKTEEDIFAHLGLDYIPPWQRNA

SEQ ID NO: 426 - protein, 362 aa, Artificial Sequence
  Modified TdT Sequence
MENLYFQGTVSQYACQRRTTMENHNQIFTDAFAILAENAEFNESEGPALAFLRAASLLKSLPHAISSSKDLEGLPCLGDQTKAVIEDILEYGQCSKVQDVLCDDRYQTIKLFTSVFGVGLKTAEKWYRKGFHSLEEVQADKAIQFTKMQKAGFLYYDDISAAVCKAEADAIGQIVEETVRLIAPDAIVTLTGGFRRGKEIGHDVDFLITTPEAGKEQLLPKVINLLEKKGLLLYYDLVESTFDKTRLPCRKFEAMDHFQKCFAIIKLKKELAAGRVQKDWKAIRVDFVMPPVDNFAFALLGWTGSRQFERDLRRFARHERKMLLDRHALYDKTKKIFLPAKTEEEIFAHLGLDYIPPWQRNA

SEQ ID NO: 427 - protein, 362 aa, Artificial Sequence
  Modified TdT Sequence
MENLYFQGTVSQYACQRRTTMENHNQIFTDAFAILAENAEFNESEGPALAFRRAASLLKSLPHAISSSKDLEGLPCLGDQTKAVIEEIYEYGQCSKVQDVLCDDRYQTIKLFTSVFGVGLKTAEKWYRKGFHSLEEVQADKAIQFTKMQKAGFLYYDDISAAVCKAEADAIGQIVEETVRLIAPDAIVTLTGGFRRGKECGHDVDFLITTPEMGKEQLLPKVINLLEKKGLLLYYDLVESTFDKTRLPCRKFEAMDHFQKCFAIIKLKKELAAGRVQKDWKAIRVDFVMPPIDNFAFALLGWTGSRQFERDLRRFARHERKMLLDRHALYDKTKKIFLPAKTEEDIFAHLGLDYIPPWQRNA

SEQ ID NO: 428 - protein, 362 aa, Artificial Sequence
  Modified TdT Sequence
MENLYFQGTVSQYACQRRTTMENHNQIFTDAFAILAENAEFNESEGPCLAFRRAASLLKSLPHAISSSKDLEGLPCLGDQTKAVIEDILEYGQCSKVQDVLCDDRYQTIKLFTSVFGVGLKTAEKWYRKGFHSLEEVQADKAIHFTKMQKAGFLYYDDISAAVCKAEADAIGQIVEETVRLIAPDAIVTLTGGFRRGKECGHDVDFLITTPEMGKEQLLPKVINLWEKKGLLLYYDLVESTFDKTRLPCRKFEAMDHFQKCFAIIKLKKELADGRVQKDWKAIRVDFVLPPVDNFAFALLGWTGSRQFERDLRRFARHERRMLLDRHALYDKTKKIFLPAKTEEDIFAHLGLDYIPPWQRNA

SEQ ID NO: 429 - protein, 362 aa, Artificial Sequence
  Modified TdT Sequence
MENLYFQGTVSQYACQRRTTMENHNQIFTDAFAILAENAEFNESEGPCLAFRRAASLLKSLPHAISSSKDLEGLPCLGDQTKAVIEDILEYGQCSKVQDVLCDDRYKTIKLFTSVFGVGPKTAEKWYRKGFHSLEEVQADKAIHFTKMQKAGFLYYDDISAAVCKAEADAIGQIVEETVRLIAPDAIVTLTGGFRRGKEIGHDVDFLITTPEMGKEQLLPRVINLLEKKGLLLYYDLVESTFDKTRLPCRKFEAMDHFQKCFAIIKLKKELAAGRVQKDWKAIRVDFVMPPVDNFAFALLGWTGSRQFERDLRRFARHERKMLLDRHALYDKTKKIFLPAKTEEDIFAHLGLDYVPPWQRNA

SEQ ID NO: 430 - protein, 362 aa, Artificial Sequence
  Modified TdT Sequence
MENLYFQGTVSQYACQRRTTMENHNQIFTDAFAILAENAEFNENEGPALAFRRAASLLKSLPHAISSSKDLEGLPCLGDQTKAVIEDILEYGQCSKVQDVLCDDRYQTIKLFTSVFGVGLKTAEKWYRKGFHSLEEVQADKAIQFTKMQRAGFLYYDDISAAVCKAEADAIGQIVEETVRLIAPDAIVTLTGGFRRGKECGHDVDFLITTPEMGKEQLLPKVINLLEKKGLLLYYDLVESTFDKTRLPCRKFEAMDHFQKCFAIIKLKKELAAGRVQKDWKAIRVDFVMPPVDNFAFALLGWTGSRQFERDLRRFARHERKMLLDRHALYDKTKRIFLPAKTEEDIFAHLGLDYIPPWQRNA

SEQ ID NO: 431 - protein, 362 aa, Artificial Sequence
  Modified TdT Sequence
MENLYFQGTVSQYACQRRTTMENHNQIFTDAFAILAENAEFNESEGPCLAFRRAASLLKSLPHAISSSKDLEGLPCLGDRTKAVIEDILEYGQCSKVQDVLCDDRYQTIKLFTSVFGVGLKTAEKWYRMGFHSLEEVQADKAIHFTKMQKAGFLYYDDISAAVCKAEADAIGQIVEETVRLIAPDAIVTLTGGFRRGKECGHDVDFLITTPEMGKEQLLPKVINLWEKKGLLLYYDLVESTFDKTRLPCRKFEAMDHFQKCFAIIKLKAELAAGRVQKDWKAIRVDFVMPPVDNFAFALLGWTGSRQFERDLRRFARHERKMLLDRHALYDKTKKIFLPAKTEEDIFAHLGLDYIPPWQRNA

SEQ ID NO: 432 - protein, 362 aa, Artificial Sequence
  Modified TdT Sequence
MENLYFQGTVSQYACQRRTTMENHNQIFTDAFAILAENAEFNESEGPALAFRRAASLLKSLPHAISSSKDLEGLPCLGDQTKAVIEDILEYGQCSKVQDVLCDDRYQTIKLFTSVFGVGLKTAEKWYRKGFHSLEEVQADKAIHFTKMQKAGFLYYDDISAAVCKAEADAIGQIVEETVRLIAPDAIVTLTGGFRRGKEIGHDVDFLITTPEMGKEQLLPRLINLLEKKGLLLYYDLVESTFDKTRLPCRKFEAMDHFQKCFAIIKLKQELAAGRVQKDWKAIRVDFVMPPVDNFAFALLGWTGSRQFERDLRRFARHERKMLLDRHALYDKTKKIFLPAKTEEDIFAHLGLDYIPPWQRNA

SEQ ID NO: 433 - protein, 362 aa, Artificial Sequence
  Modified TdT Sequence
MENLYFQGTVSQYACQRRTTMENHNQIFTDAFAILAENAEFNESEGPALAFRRAASLLKSLPHTISSSKDLEGLPCLGDQTKAVIEDILEYGQCSKVQDVLCDDRYQTIKLFTSVFGVGLKTAEKWYRKGFHSLEEVQADKAIQFTKMQKAGFLYYDDISAAVCKAEADAIGQIVEETVRKIAPDAIVTLTGGFRRGKECGHDVDFLITTPEMGKEQLLPDVINLLEKKGLLLYYDLIESTFDKTRLPCRKFEAMDHFQKCFAIIKLKKELAAGRVQKDWKAIRVDFVMPPIDNFAFALLGWTGSRQFERDLRRFARHERKMLLDRHALYDKTKKIFLPAKTEEDIFAHLGLDYIPPWQRNA

SEQ ID NO: 434 - protein, 362 aa, Artificial Sequence
  Modified TdT Sequence
MENLYFQGTVSQYACQRRTTMENHNQIFTDAFAILAENAEFNESEGPALAFRRAASLLKSLPHAISSSKDLEGLPCLGDQTKAVIEDILEYGQCSKVQDVLCDDRYQTIKLFTSVFGVGLKTAEKWYRKGFHSLEEVQADKAIHFTKMQKAGFLYYDDISAAVCKAEADAIGQIVEETVRLIAPDAIVALTGGFRRGKEIGHDVDFLITTPEMGKEQLLPRVINLLEKKGLLLYYDLVESTFDKTRLPCRKFEAMDHFQKCFAIIKLKKELAAGRVQKDWKAIRVDFVMPPVDNFAFALLGWTGSRQFERDLRRFARHERKMLLDRHALYDKTKKIFLPAKTEEDIFAHLGLDYVPPWQRNA

SEQ ID NO: 435 - protein, 362 aa, Artificial Sequence
  Modified TdT Sequence
MENLYFQGTVSQYACQRRTTMENHNQIFTDAFAILAENAEFNESEGPCLAFRRAASLLKSLPHAISCSKDLEGLPCLGDQTKAVIEDILEYGQCSKVQDVLCDDRYQTIKLFTSVFGVGLKTAEKWYRKGFHSLEEVQAEKAIHFTKMQKAGFLYYDDISAAVCKAEADAIGQIVEETVRLIAPDAIVTLTGGFRRGKECGHDVDFLITTPEMGKEQLLPKVINLWEKKGLLLYYDLVESTFDKTRLPCRKFEAMDHFQKCFAIIKLKKELAAGRVQKDWKAIRVDFVMPPVDNFAFALLGWTGSRQFERDLRRFARHERKMLLDRHALYDKRKKIFLPAKTEEDIFAHLGLDYIPPWQRNA

SEQ ID NO: 436 - protein, 362 aa, Artificial Sequence
  Modified TdT Sequence
MENLYFQGTVSQYACQRRTTLENHNQIFTDAFAILAENAEFNESEGPALAFRRAASLLKSLPHAISSSKDLEGLPCLGDQTKAVIEEILEYGQCSKVQDVLCDDRYQTIKLFTSVFGVGLKTAEKWYRKGFHSLEEVQADKAIHFTKMQKAGFLYYDDISAAVCKAEADAIGQIVEETVRLIAPDAIVTLTGGFRRGKECGHDVDFLITTPEMGKEQLLPDVINLLEKKGLLLYYDLVESTFDKTRLPCRKFEAMDHFQKCFAIIKLKKELAAGRVQKDWKAIRVDFVMPPIDNFAFALLGWTGSRQFERDLRRFARHERKMLLDRHALYDKTKKIFLPAKTEEDIFAHLGLDYIPPWQRNA

SEQ ID NO: 437 - protein, 362 aa, Artificial Sequence
  Modified TdT Sequence
MENLYFQGTVSQYACQRRTTMENHNQIFTDAFAILAENAEFNESEGPALAFRRAASLLKSLPHAISSSKDLEGLPCLGDQTKAVIEDILEYGQCSKVQDVLCDDRYQTIKLFTSVFGVGLKTAEKWYRKGFHSLEEVQADKAIHFTKMQKAGFLYYDDISAAVCKAEADAIGQIVEETVRLIAPDAIVTLTGGFRRGKEIGHDVDFLITTPEMGKEQLLPRVINLLEKKGLLLYYDLVESTFDKTRLPCRKFEAMDHFQKCFAIIKLKKELAAGRVQKDWKAIRVDFVMPPVDCFAFALLGWTGSRQFERDLRRFARHERKMLLDRHALYDKTKRIFLPAKTEEDIFAHLGLDYIPPWQRNA

SEQ ID NO: 438 - protein, 362 aa, Artificial Sequence
  Modified TdT Sequence
MENLYFQGTVSQYACQRRTTMENHNKIFTDAFAILAENAEFNESEGPCLAFRRAASLLKSLPHAISSSKDLEGLPCLGDQTKAVIEDILEYGQCSKVQDVLCDDRYKTIKLFTSVFGVGLKTAEKWYRKGFHSLEEVQADKAIQFTKMQKAGFLYYDDISAAVCKAEADAIGQIVEETVRLIAPDAIVTLTGGFRRGKEIGHDVDFLITTPEMGKEQLLPRVINLLEKKGLLLYYDLVESTFDKTRLPCRKFEAMDHFQKCFAIIKLKKELAAGRVQKDWKAIRVDFVMPPVDNFAFALLGWTGSRQFERDLRRFARHERKMLLDRHALYDKTKKIFLPAKTEEDIFAHLGLDYIPPWQRNA

SEQ ID NO: 439 - protein, 362 aa, Artificial Sequence
  Modified TdT Sequence
MENLYFQGTVSQYACQRRTTMENHNQIFTDAFAILAENAEFNESEGPALAFRRAASLLKSLPHAISSSKDLEGLPCLGDQTKAVIEEILEYGQCSKVQDVLCDDRYQTIKLFTSVFGVGLKTAEKWYRKGFHSLEEVQADKAIQFTKMQKAGFLYYDDISAAVCKAEADAIGQIVEETVRLIAPDALVTLTGGFRRGKEIGHDVDFLITTPEMGKEQLLPKVINLLEKKGLLLYYDLIESTFDKTRLPCRKFEAMDHFQKCFAIIKLKKELAAGRVQKDWKAIRVDFVMPPVDNFAFALLGWTGSRQFERDLRRFARHERKMLLDRHALYDKTKKIFLPAKTEEDIFAHLGLDYIPPWQRNA

SEQ ID NO: 440 - protein, 362 aa, Artificial Sequence
  Modified TdT Sequence
MENLYFQGTVSQYACQRRTTMENHNQIFTDAFAILAENAEFNESEGPALAFRRAASLLKSLPHAISSSKDLEGLPCLGDQTKAVIEDILEYGQCSKVQDVLCDDRYQTIKLFTSVFGVGLKTAEKWYRMGFHSLEEVQADKAIQFTKMQKAGFLYYDDISAAVCKAEADAIGQIVEETVRLIAPDAIVTLTGGFRRGKEIGHDVDFLITTPEMGKEQLLPKLINLLEKKGLLLYYDLVESTFDKTRLPCRKFEAMDHFQKCFAIIKLKKELAAGRVQKDWKAIRVDFVMPPVDNFAFALLGWTGSRQFERDLRRFARHERKMLLDRHALYDKTKKIFLPAKTEEEIFAHLGLDYIPPWQRNA

SEQ ID NO: 441 - protein, 362 aa, Artificial Sequence
  Modified TdT Sequence
MENLYFQGTVSQYACQRRTTMENHNQIFTDAFAILAENAEFNENEGPALAFRRAASLLKSLPHAISSSKDLEGLPCLGDQTKAVIEDILEYGQCSKVQDVLCDDRYQTIKLFTSVFGVGLKTAEKWYRKGFHSLEEVQADKAIHFTKMQKAGFLYYDDISAAVCKAEADAIGQIVEETVRLIAPDAIVTLTGGFRRGKEIGHDVDFLITTPEMGKEQLLPRVINLLEKKGLLLYYDLVESTFDKTRLPCRKFEAMDHFQKCFAIIKLKKELAAGRVQKDWKAIRVDFVLPPVDNFAFALLGWTGSRQFERDLRRFARHERKMLLDRHALYDKTKKIFLPAKTEEDIFAHLGLDYIPPWQRNA

SEQ ID NO: 442 - protein, 362 aa, Artificial Sequence
  Modified TdT Sequence
MENLYFQGTVSQYACQRRTTMENHNQIFTDAFAILAENAEFNESEGPALAFRRAASLLKSLPHAISSSKDLEGLPCLGDQTKAVIEEILEYGQCSKVQEVLCDDRYQTIKLFTSVFGVGLKTAEKWYRKGFHSLEEVQADKAIQFTKMQKAGFLYYDDISAAVCKAEADAIGQIVEETVRKIAPDAIVTLTGGFRRGKECGHDVDFLITTPEMGKEQLLPDVINLLEKKGLLLYYDLVESTFDKTRLPCRKFEAMDHFQKCFAIIKLKKELAAGRVQKDWKAIRVDFVMPPIDNFAFALLGWTGSRQFERDLRRFARHERKMLLDRHALYDKTKKIFLPAKTEEDIFAHLGLDYIPPWQRNA

SEQ ID NO: 443 - protein, 362 aa, Artificial Sequence
  Modified TdT Sequence
MENLYFQGTVSQYACQRRTTMENHNQIFTDAFAILAENAEFNESEGPCLAFRRAASLLKSLPHAISSSKDLEGLPCLGDQTKAVIEDILEYGQCSKVQDVLCDDRYQTIKLFTSVFGVGLKTAEKWYRKGFHTLEEVQADKAIHFTKMQKAGFLYYDDISAAVCKAEADAIGQIVEETVRGIAPDAIVTLTGGFRRGKEIGHDVDFLITTPEMGKEQLLPRVINLLEKKGLLLYYDLVESTFDKTRLPCRKFEAMDHFQKCFAIIKLKKELAAGRVQKDWKAIRVDFVMPPVDNFAFALLGWTGSRQFERDLRRFARHERKMLLDRHALYDRTKKIFLPAKTEEDIFAHLGLDYIPPWQRNA

SEQ ID NO: 444 - protein, 362 aa, Artificial Sequence
  Modified TdT Sequence
MENLYFQGTVSQYACQRRTTMENHNQIFTDAFAILAENAEFNENEGPALAFRRAASLLKSLPHAISSSKDLEGLPCLGDQTKAVIEDILEYGQCSKVQDVLCDDRYQTIKLFTSVFGVGLKTAEKWYRKGFHSLEEVQADKAIQFTKMQKAGFLYYDDISAAVCKAEADAIGQIVEETVRLIAPDAIVTLTGGFRRGKEIGHDVDFIITTPEMGKEQLLPKVINLLEKKGLLLYYDLVESTFDKTRLPCRKFEAMDHFQKCFAIIKLKKELAAGRVQKDWKAIRVDFVMPPVDNFAFALLGWTGSRQFERDLRRFARHERKMLLDRHALYDRTKKIFLPAKTEEEIFAHLGLDYIPPWQRNA

SEQ ID NO: 445 - protein, 362 aa, Artificial Sequence
  Modified TdT Sequence
MENLYFQGTVSQYACQRRTTMENHNQIFTDAFAILAENAEFNESEGPALAFRRAASLLKSLPHAISSSKDLEGLPCLGDQTKAVIEDILEYGQCSKVQDVLCDDRYQTIKLFTSVFGVGLKTAEKWYRKGFHSLEEVQADKAIQFTKMQKAGFLYYDDISAAVCKAEADAIGCVVEETVRLIAPDAIVTLTGGFRRGKEIGHDVDFLITTPEQGKEQLLPKVINLLEQKGLLLYYDLVESTFDKTRLPCRKFEAMDHFQKCFAIIKLKKELAAGRVQKDWKAIRVDFVMPPVDNFAFALLGWTGSRQFERDLRRFARHERKMLLDRHALYDKTKKIFLPAKTEEDIFAHLGLDYIPPWQRNA

SEQ ID NO: 446 - protein, 362 aa, Artificial Sequence
  Modified TdT Sequence
MENLYFQGTVSQYACQRRTTMENHNQIFTDAFAILAENAEFNESEGPALAFRRAASLLKSLPHAISSSKDLEGLPCLGDQTKAVIEDILEYGQCSKVQDVLCDDRYQTIKLFTSVFGVGLKTAEKWYRKGFHSLEEVQADKAIQFTKMQKAGFLYYDDISAAVCKAEADAIGQIVEETVRLIAPDAIVTLTGGFRRGKEIGHDVDFLITTPEMGKEQLLPKVINLLEKKGLLLFYDLVESTFDKTRLPCRKFEAMDHFQKCFAIIKLKKELAAGRVQKDWKAIRVDFVMPPIDNFAFALLGWTGSRQFERDLRRFARHERKMLLDRHALYDKTKKIFLPAKTEEEIFAHLGLDYIPPWQRNA

SEQ ID NO: 447 - protein, 362 aa, Artificial Sequence
  Modified TdT Sequence
MENLYFQGTVSQYACQRRTTMENHNQIFTDAFAILAENAEFNESEGPSLAFRRAASLLKSLPHAISSSKDLEGLPCLGDQTKAVIEDILEYGQCSKVQDVLCDDRYQTIKLFTSVFGVGLKTAEKWYRKGFHSLEEVQADKAIQFTKMQKAGFLYYDDISAAVCKAEADAIGQIVEETVRLIAPDAIVTLTGGFRRGKEIGHDVDFLITTPEMGKEQLLPKVINLLEKKGLLLYYDLVESTFDKTRLPCRKFEAMDHFQKCFAILKLKKELAAGRVQKDWKAIRVDFVMPPVDNFAFALLGWTGSRQFERDLRRFARHERKMLLDRHALYDKTKKIFLPAKSEEDIFAHLGLDYIPPWQRNA

SEQ ID NO: 448 - protein, 362 aa, Artificial Sequence
  Modified TdT Sequence
MENLYFQGTVSQYACQRRTTMENHNQIFTDAFAILAENAEFNESEGPCLAFRRAASLLKSLPHAISSSKDLEGLPCLGDQTKAVIEDILEYGQCSKVQDVLCDDRYQTIKLFTSVFGVGLKTAEKWYRKGFHSLEDVQADKAIHFTKMQKAGFLYYDDISAAVCRAEADAIGQIVEETVRLIAPDAIVTLTGGFRRGKECGHDVDFLITTPEMGKEQLLPKVIRLWEKKGLLLYYDLVESTFDKTRLPCRKFEAMDHFQKCFAIIKLKKELAAGRVQKDWKAIRVDFVMPPVDNFAFALLGWTGSRQFERDLRRFARHERKMLLDRHALYDKTKKIFLPAKTEEDIFAHLGLDYIPPWQRNA

SEQ ID NO: 449 - protein, 362 aa, Artificial Sequence
  Modified TdT Sequence
MENLYFQGTVSQYACQRRTTMENHNQIFTDAFAILAENAEFNESEGPCLAFRRAASLLKSLPHAISSSKDLEGLPCLGDQTKAVIEDILEYGQCSKVQDVLCDDRYQTIKLFTSVFGVGLKTAEKWYRKGFHSLEEVQADKAIHFTKMQKAGFLYYDDISAAVCKAEADAIGQIVEETVRLIAPDAIVTLTGGFRRGKEIGHDVDFLITTPEMGKEQLLPRVINLLEKKGLLLYYDLVESTFDKTRLPCRKFEAMDHFQKCFAIIKLKKELAAGRVQKDWKAIRVDFVMPPVDNFAFALLGWTGSRQFERDLRRFARHERKMLLDRHALYDKTKKIFLPAKTEEDIFAHLGLDYIPPWQRNA

SEQ ID NO: 450 - protein, 362 aa, Artificial Sequence
  Modified TdT Sequence
MENLYFQGTVSQYACQRRTTMENHNQIFTDAFAILAENAEFNESEGPALAFRRAASLLKSLPHAISSSKDLEGLPCLGDQTKAVIEDIYEYGQCSKVQDVLCDDRYQTIKLFTSVFGVGLKTAEKWYRKGFHSLEEVQADKAIQFTKMQKAGFLYYDDISAAVCKAEADAIGQIVEETVHLIAPDAIVTLTGGFRRGKECGHDVDFLITTPEKGKEQLLPDVINLLEKKGLLLYYDLVESTFDKTRLPCRKFEAMDHFQKCFAIIKLKKELAAGRVQKDWKAIRVDFVMPPADNFAFALLGWTGSRQFERDLRRFARHERKMLLDRHALYDKTKKIFLPAKTEEDIFAHLGLDYIPPWQRNA

SEQ ID NO: 451 - protein, 362 aa, Artificial Sequence
  Modified TdT Sequence
MENLYFQGTVSQYACQRRTTMENHNQIFTDAFAILAENAEFNESEGPCLAFRRAASLLKSLPHAISSSKDLEGLPCLGDQTKAVIEDILEYGQCSKVQDVLCDDRYQTIKLFTSVFGVGPKTAEKWYRKGFHSLEEVQADKAIHFTKMQKAGFLYYDDISAAVCKAEADAIGQIVEETVRLIAPDAIVTLTGGFRRGKEIGHDVDFLITTPEMGREQLLPRVINLWEKKGLLLYYDLVESTFDKTRLPCRKFEAMDHFQKCFAIIKLKKELAAGRVQKDWKAIRVDFVMPPVDNFAFALLGWTGSRQFERDLRRFARHERKMLLDRHALYDKTKKIFLPAKTEEDIFAHLGLDYIPPWQRNA

SEQ ID NO: 452 - protein, 362 aa, Artificial Sequence
  Modified TdT Sequence
MENLYFQGTVSQYACQRRTTMENHNQIFTDAFAILAENAEFNESEGPCLAFRRAASLLKSLPHAISSSKDLEGLPCLGDQTKAVIEDILEYGQCSKVQDVLCDDRYQTIKLFTSVFGVGLKTAEKWYRKGFHSLEEVQADKAIHFTKMQKAGFLYYDDISAAVCRAEADAIGQIVEETVRLIAPDAIVTLTGGFRRGKEIGHDVDFLITTPEMGKEQLLPKVINLWEKKGLLLYYDLVESTFDKTRLPCRKFEAMDHFQKCFAIIKLKKELAAGRVQKDWKAIRVDFVMPPIDNFAFALLGWTGSRQFERDLRRFARHERKMLLDRHALYDKTKKIFLPAKTEEDIFAHLGLDYIPPWQRNA

SEQ ID NO: 453 - protein, 362 aa, Artificial Sequence
  Modified TdT Sequence
MENLYFQGTVSQYACQRRTTMENRNQIFTDAFAILAENAEFNESEGPALAFRRAASLLKSLPHAISSSKDLEGLPCLGDQTKGVIEDILEYGQCSKVQDVLCDDRYQTIKLFTSVFGVGLKTAEKWYRKGFHSLEEVQADKAIQFTKMQKAGFLYYDDISAAVCKAEADAIGQIVEETVRLIAPDAIVTLTGGFRRGKECGHDVDFIITTPEMGKEQLLPDVINLLEKKGLLLYYDLVESTFDKTRLPCRKFEAMDHFQKCFAIIKLKKELAAGRVQKDWKAIRVDFVMPPIDNFAFALLGWTGSRQFERDLRRFARHERKMLLDRHALYDKTKKIFLPAKTEEDIFAHLGLDYIPPWQRNA

SEQ ID NO: 454 - protein, 362 aa, Artificial Sequence
  Modified TdT Sequence
MENLYFQGTVSQYACQRRTTMENHNQIFTDAFAILAENAEFNESEGPALAFRRAASLLKSLPHAISSSKDLEGLPCLGDQTKAVIEDILEYGQCSKVQDVLCDDRYQTIKLFTSVFGVGLKTAEKWYRKGFHSLEEVQADKAIQFTKMQKAGFLYYDDISAAVCKAEADAIGQIVEETVHLIAPDAIVTLTGGFRRGKEIGHDVDFLITTPEAGKEQLLPKVINLLEKKGLLLYYDLVESTFDKTRLPCRKFEAMDHFQKCFAIIKLKKELADGRVQKDWKAIRVDFVMPPIDNFAFALLGWTGSRQFERDLRRFARHERKMLLDRHALYDKTKKIFLPAKTEEDIFAHLGLDYIPPWQRNA

SEQ ID NO: 455 - protein, 362 aa, Artificial Sequence
  Modified TdT Sequence
MENLYFQGTVSQYACQRRTTMENHNQIFTDAFAILAENAEFNESEGPALAFRRAASLLKSLPHAISSSKDLEGLPCLGDQTKAVIEDILEYGQCSKVQDVLCDDRYQTIKLFTSVFGVGLKTAEKWYRKGFHSLEEVQADKAIQFTKMQKAGFLYYDDISAAVCKAEADAIGQIVEETVRLIAPDALVTLTGGFRRGKEIGHDVDFIITTPEMGREQLLPKVINLLEQKGLLLYYDLVESTFDKTRLPCRKFEAMDHFQKCFAIIKLKKELAAGRVQKDWKAIRVDFVMPPVDNFAFALLGWTGSRQFERDLRRFARHERKMLLDRHALYDKTKKIFLPAKTEEDIFAHLGLDYIPPWQRNA

SEQ ID NO: 456 - protein, 362 aa, Artificial Sequence
  Modified TdT Sequence
MENLYFQGTVSQYACQRRTTMENHNQIFTDAFAILAENAEFNESEGPCLAFRRAASLLKSLPHAISSSKDLEGLPCLGDQTKAVIEDILEYGQCSKVQDVLCDDRYQTIKLFTSVFGVGLKTAEKWYRKGFHSLEEVQADNAIHFSKMQKAGFLYYDDISAAVCKAEADAIGQIVEETVRLITPDAIVTLTGGFRRGKECGHDVDFLITTPEMGKEQLLPKVINLWEKKGLLLYYDLVESTFDKTRLPCRKFEAMDHFQKCFAIIKLKKELAAGRVQKDWKAIRVDFVMPPVDNFAFALLGWTGSRQFERDLRRFARHERKMLLDRHALYDKTKKIFLPAKTEEDIFAHLGLDYIPPWQRNA

SEQ ID NO: 457 - protein, 362 aa, Artificial Sequence
  Modified TdT Sequence
MENLYFQGTVSQYACQRRTTMENHNQIFTDAFAILAENAEFNESEGPALAFRRAASLLKSLPHAISSSKDLEGLPCLGDQTKAVIEDILEYGQCSKVQDVLCDDRYKTIKLFTSVFGVGLKTAEKWYRKGFHSLEEVQADKAIQFTKMQKAGFLYYDDISAAVCKAEADAIGQIVEETVRLIAPDAIVTLTGGFRRGKEIGHDVDFLITTPEMGKEQLLPKVINLLEKKGLLLYYDLVESTFDKTRLPCRKFEAMDHFQKCFAIIKLKKELADGRVQKDWKAIRVDFVMPPVDNFAFALLGWTGSRQFERDLRRFARHERKMLLDRHALYDKTKKIFLPAKTEEEIFAHLGLDYIPPWQRNA

SEQ ID NO: 458 - protein, 362 aa, Artificial Sequence
  Modified TdT Sequence
MENLYFQGTVSQYACQRRTTMENHNQIFTDAFAILAENAEFNESEGPCLAFRRAASLLKSLPHAISSSKDLEGLPCLGDQTKAVIEDILEYGQCSKVQDVLCDDRYQTIKLFTSVFGVGLKTAEKWYRKGFHSLEEVQADKAIHFTKMQKAGFLYYDDISAAVCKAEADAIGRIVEETVRLIAPDAIVTLTGGFRRGKECGHDVDFLITTPEMGKEQLLPKVINLWEKKGLLLYYDLVESTFDKSRLPCRKFEAMDHFQKCFAIIKLKKELAAGRVQKDWKAIRVDFVLPPVDNFAFALLGWTGSRQFERDLRRFARHERKMLLDRHALYDKTKKIFLPAKTEEDIFAHLGLDYIPPWQRNA

SEQ ID NO: 459 - protein, 362 aa, Artificial Sequence
  Modified TdT Sequence
MENLYFQGTVSQYACQRRTTMENHNQIFTDAFAILAENAEFNESEGPCLAFRRAASLLKSLPHAISSSKDLEGLPCLGDQTKAVIEDILEYGQCSKAQDVLCDDRYQTIKLFTSVFGVGLKTAEKWYRKGFHSLEEVQADKAIHFTKMQKAGFLYYDDISAAVCKAEADAIGQIVEETVRLITPDAIVTLTGGFRRGKECGHDVDFLITTPEMGKEQLLPKIINLWEKKGLLLYYDLVESTFDKTRLPCRKFEAMDHFQKCFAIIKLKKELAAGRVQKDWKAIRVDFVMPPVDNFAFALLGWTGSRQFERDLRRFARHERKMLLDRHALYDKTKKIFLPAKTEEDIFAHLGLDYIPPWQRNA

SEQ ID NO: 460 - protein, 362 aa, Artificial Sequence
  Modified TdT Sequence
MENLYFQGTVSQYACQRRTTMENHNQIFTDAFAILAENAEFNESEGPALAFRRAASLLKSLPHAISSLKDLEGLPCLGDQTKAVIEDILEYGQCSKVQDVLCDDRYQTIKLFTSVFGVGLKTAEKWYRKGFHSLEEVQADKAIQFTKMQKAGFLYYDDISAAVCKAEADAIGQIVEETVRLIAPDALVTLTGGFRRGKECGHDVDFLITTPEKGKEQLLPDVINLLEKKGLLLYYDLVESTFDKTRLPCRKFEAMDHFQKCFAIIKLKKELAAGRVQKDWKAIRVDFVMPPIDNFAFALLGWTGSRQFERDLRRFARHERKMLLDRHALYDKTKKIFLPAKTEEDIFAHLGLDYIPPWQRNA

SEQ ID NO: 461 - protein, 362 aa, Artificial Sequence
  Modified TdT Sequence
MENLYFQGTVSQYACQRRTTMENHNQIFTDAFAILAENAEFNESEGPALAFRRAASLLKSLPHAISSSKDLEGLPCLGDQTKAVIEDILEYGQCSKVQDVLCDDRYQTIKLFTSVFGVGLKTAEKWYRKGFHSLEEVQADKAIQFTKMQKAGFLYYDDISAAVCKAEADAIGQIVEETVRLIAPDAIVTLTGGFRRAKECGHDVDFLITTPEQGKEQLLPDVINLLEKKGLLLYYDLVESTFDKTRLPCRKFEAMDHFQKCFAIIKLKKERAAGRVQKDWKAIRVDFVMPPIDNFAFALLGWTGSRQFERDLRRFARHERKMLLDRHALYDKTKKIFLPAKTEEDIFAHLGLDYIPPWQRNA

SEQ ID NO: 462 - protein, 362 aa, Artificial Sequence
  Modified TdT Sequence
MENLYFQGTVSQYACQRRTTTENHNQIFTDAFAILAENAEFNESEGPALAFRRAASLLKSLPHAISSSKDLEGLPCLGDQTKAVIEDILEYGQCSKVQDVLCDDRYQTIKLFTSVFGVGLKTAEKWYRKGFHSLEEVQADKSIQFTKMQKAGFLYYDDISAAVCKAEADAIGQIVEETVRLIAPDAIVTLTGGFRRGKECGHDVDFLITTPEMGKEQLLPDVINLLEKKGLLLYYDLVESTFDKTRLPCRKFEAMDHFQKCFAIIKLKKELAAGRVQKDWKAIRVDFVMPPIDNFAFALLGWTGSRQFERDLRRFARHERKMLLDRHALYDKTKKIFLPAKTEEDIFAHLGLEYIPPWQRNA

SEQ ID NO: 463 - protein, 362 aa, Artificial Sequence
  Modified TdT Sequence
MENLYFQGTVSQYACQRRTTTENHNQIFTDAFAILAENAEFNESEGPALAFRRAASLLKSLPHAILSSKDLEGLPCLGDQTKAVIEEILEYGQCSKVQDVLCDDRYQTIKLFTSVFGVGLKTAEKWYRKGFHSLEEVQADKAIQFTKMQKAGFLYYDDISAAVCKAEADAIGHIVEETVRLIAPDAIVTLTGGFRRGKECGHDVDFLITTPEMGKEQLLPDVINLLEKKGLLLYYDLVESTFDKTRLPCRKFEAMDHFQKCFAIIKLKKELAAGRVQKDWKAIRVDFVMPPIDNFAFALLGWTGSRQFERDLRRFARHERKMLLDRHALYDKTKKIFLPAKTEEDIFAHLGLDYIPPWQRNA

SEQ ID NO: 464 - protein, 362 aa, Artificial Sequence
  Modified TdT Sequence
MENLYFQGTVSQYACQRRTTMENHNQIFTDAFAILAENAEFNESEGPSLAFRRAASLLKSLPHAISSSKDLEGLPCLGDQTKAVIEDILEYGQCSKVQDVLCDDRYQTIKLFTSVFGVGLKTAEKWYRKGFHSLEEVQADKAIQFTKMQRAGFLYYDDISAAVCKAEADAIGQIVEETVRLIAPDAIVTLTGGFRRGKEIGHDVDFLITTPEMGKEQLLPKLINLLEKKGLLLYYDLVESTFDKTRLPCRKFEAMDHFQKCFAIIKLKKELAAGRVQKDWKAIRVDFVMPPVDNFAFALLGWTGSRQFERDLRRFARHERKMLLDRHALYDKTKKIFLPAKTEEDIFAHLGLDYIPPWQRNA

SEQ ID NO: 465 - protein, 362 aa, Artificial Sequence
  Modified TdT Sequence
MENLYFQGTVSQYACQRRTTMENHNQIFTDAFAILAENAEFNESEGPCLAFRRAASLLKSLPHAISSSKDLEGLPCLGDQTKAVIEDILEYGQCSKVQDVLCDDRYQTIKLFTSVFGVGLKTAEKWYRKGFHSLEEVQANKAIHFTKMQKAGFLYYDDISAAVCKAEADAIGQIVEETVRLIAPDAIVTLTGGFRRGKECGHDVDFLITTPEMGKEQLLPKVVNLWEKKGLLLYYDLVESTFDKTRLPCRKFEAMDHFQKCFAIIKLKKELAAGRVQKDWKAIRVDFVMPPVDNYAFALLGWTGSRQFERDLRRFARHERKMLLDRHALYDKTKKIFLPAKTEEDIFAHLGLDYIPPWQRNA

SEQ ID NO: 466 - protein, 362 aa, Artificial Sequence
  Modified TdT Sequence
MENLYFQGTVSQYACQRRTTMENHNQIFTDAFAILAENAEFNESEGPCVAFRRAASLLKSLPHAISSSKDLEGLPCLGDQTKAVIEDILEYGQCSKVQDVLCDDRYQTIKLFTSVFGVGLKTAEKWYRKGFHSLEEVQADKAIHFTKMQKAGFLYYDDISAAVCKAEADAIGQIVEETVRLIAPDAIVTLTGGFRRGKECGHDVDFLITTPEMGKEQLLPRVINLLEKKGLLLYYDLVESTFDKTRLPCRKFEAMDHFQKCFAIIKLKKELAAGRVQKDWKAIRVDFVMPPVDCFAFALLGWTGSRQFERDLRRFARHERKMLLDRHALYDKTKKIFLPAKTEEDIFAHLGLDYIPPWQRNA

SEQ ID NO: 467 - protein, 362 aa, Artificial Sequence
  Modified TdT Sequence
MENLYFQGTVSQYACQRRTTMENHNQIFTDAFAILAENAEFNESEGPALAFRRAASLLKSLPHAISSSKDLEGLPCLGDQTKAVIEDIYEYGQCSKVQDVLCDDRYQTIKLFTSVFGVGLKTAEKWYRKGFHSLEEVQADKAIHFTKMQKAGFLYYDDISAAVCKAEADAIGQIVEETVRAIAPDAIVTLTGGFRRGKECGHDVDFLITTPEMGKEQLLPDVINLLEKKGLLLYYDLVESTFDKTRLPCRKFEAMDHFQKCFAIIKLKKELAAGRVQKDWKAIRVDFVMPPIDNFAFALLGWTGSRQFERDLRRFARHERKMLLDRHALYDKTKKIFLPAKTEEDIFAHLGLDYIPPWQRNA

SEQ ID NO: 468 - protein, 362 aa, Artificial Sequence
  Modified TdT Sequence
MENLYFQGTVSQYACQRRTTMENHNQIFTDAFAILAENAEFNESEGPCLAFRRAASLLKSLPHAISSSKDLEGLPCLGDQTKAVIEDIIEYGQCSKVQDVLCDDRYQTIKLFTSVFGVGLKTAEKWYRKGFHSLEEVQADKAIHFTKMQKAGFLYYDDISAAVCRAEADAIGQIVEETVRLIAPDAIVTLTGGFRRGKECGHDVDFLITTPEMGKEQLLPKVINLWEKKGLLLYYDLVESTFDKLRLPCRKFEAMDHFQKCFAIIKLKKELAAGRVQKDWKAIRVDFVMPPVDNFAFALLGWTGSRQFERDLRRFARHERKMLLDRHALYDKTKKIFLPAKTEEDIFAHLGLDYIPPWQRNA

SEQ ID NO: 469 - protein, 362 aa, Artificial Sequence
  Modified TdT Sequence
MENLYFQGTVSQYACQRRTTMENHNQIFTDAFAILAENAEFNESEGPALAFRRAASLLKSLPHAISSSKDLEGLPCLGDQTKAVIEDILEYGQCSKVQDVLCDDRYQTIKLFTSVFGVGLKTAEKWYRKGFHTLEEVQADKAIHFTKMQKAGFLYYDDITAAVCKAEADAIGQIVEETVRLIAPDAIVTLTGGFRRGKEIGHDVDFLITTPEMGKEQLLPRVINLLEKKGLLLYYDLVESTFDKTRLPCRKFEAMDHFQKCFAIIKLKKELAAGRVQKDWKAIRVDFVMPPVDNFAFALLGWTGSRQFERDLRRFARHERKMLLDRHALYDKTKKIFLPAKTEEDIFAHLGLDYIPPWQRNA

SEQ ID NO: 470 - protein, 362 aa, Artificial Sequence
  Modified TdT Sequence
MENLYFQGTVSQYACQRRTTMENHNQIFTDAFAILAENAEFNENEGPCLAFRRAASLLKSLPHAISSSKDLEGLPCLGDQTKAVIEDILEYGQCSKVQDVLCDDRYQTIKLFTSVFGVGLKTAEKWYRKGFHSLEEVQADKAIHFTKMQKAGFLYYDDISAAVCKAEADAIGQIVEETVRLIAPDAIVTLTGGFRRGKEIGHDVDFLITTPEMGKEQLLPRVINLLEKKGLLLYYDLVESTFDKTRLPCRKFEAMDHFQKCFAIIKLKKELAAGRVQKDWKAIRVDFVMPPVDNFAFALLGWTGSRQFERDLRRFARHERKMLLDRHALYDRTKKIFLPAKTEEDIFAHLGLDYVPPWQRNA

SEQ ID NO: 471 - protein, 362 aa, Artificial Sequence
  Modified TdT Sequence
MENLYFQGTVSQYACQRRTTMENHNQIFTDAFAILAENAEFNENEGPCLAFRRAASLLKSLPHAISSSKDLEGLPCLGDQTKAVIEDILEYGQCSKVQDVLCDDRYQTIKLFTSVFGVGLKTAEKWYRKGFHSLEEVQADKAIHFTKMQRAGFLYYDDISAAVCKAEADAIGQIVEETVRLIAPDAIVTLTGGFRRGKECGHDVDFLITTPEMGKEQLLPKVIRLWEKKGLLLYYDLVESTFDKTRLPCRKFEAMDHFQKCFAIIKLKKELAAGRVQKDWKAIRVDFVMPPVDNFAFALLGWTGSRQFERDLRRFARHERKMLLDRHALYDKTKKIFLPAKTEEDIFAHLGLDYIPPWQRNA

SEQ ID NO: 472 - protein, 362 aa, Artificial Sequence
  Modified TdT Sequence
MENLYFQGTVSQYACQRRTTMENHNQVFTDAFAILAENAEFNESEGPALAFRRAASLLKSLPHAISSSKDLEGLPCLGDQTKAVIEDILEYGQCSKVQDVLCDDRYQTIKLFTSVFGVGLKTAEKWYRKGFHSLEEVQADKAIQFTKMQKAGFLYYDDISAAVCKAEADAIGQIVEETVRLIAPDAIVTLTGGFRRGKEIGHDVDFLITTPEMGKEQLLPKVINLLEKKGLLLYYDLVESTFDKTRLPCRKFEAMDHFQKCFAIIKLKKERADGRVQKDWKAIRVDFVMPPVDNFAFALLGWTGSRQFERDLRRFARHERKMLLDRHALYDKTKKIFLPAKTEEDIFAHLGLDYIPPWQRNA

SEQ ID NO: 473 - protein, 362 aa, Artificial Sequence
  Modified TdT Sequence
MENLYFQGTVSQYACQRRTTMENHNQLFTDAFAILAENAEFNESEGPALAFRRAASLLKSLPHAISSSKDLEGLPCLGDQTKAVIEDILEYGQCSKVQDVLCDDRYQTIKLFTSVFGVGLKTAEKWYRKGFHSLEEVQADKAIQFTKMQKAGFLYYDDISAAVCKAEADAIGQIVEETVRKIAPDAIVTLTGGFRRGKECGHDVDFLITTPEMGKEQLLPDVINLLEKKGLLLYYDLVESTFDKTRLPCRKFEAMDHFQKCFAIIKLNKELAAGRVQKDWKAIRVDFVMPPIDNFAFALLGWTGSRQFERDLRRFARHERKMLLDRHALYDKTKKIFLPAKTEEDIFAHLGLDYIPPWQRNA

SEQ ID NO: 474 - protein, 362 aa, Artificial Sequence
  Modified TdT Sequence
MENLYFQGTVSQYACQRRTTMENHNQIFTDAFAILAENAEFNESEGPCLAFRRAASLLKSLPHAISSSKDLEGLPCLGDQTKAVIEDILEYGQCSKVQDVLCDDRYQTIKLFTSVFGVGLKTAEKWYRKGFHSLEEVQADKAIHFTKMQKAGFLYYDDISAAVCRAEADAIGQIVEETVRLIAPDAIVTLTGGFRRGKECGHDVDFLITTPEMGKEQLLPKVINLWEKKGLLLYYDLVESTFDKTRLPCRKFEAMDHFQKCFAIIKLKKELADGRVQKDWKAIRVDFVMPPVDRFAFALLGWTGSRQFERDLRRFARHERKMLLDRHALYDKTKKIFLPAKTEEDIFAHLGLDYIPPWQRNA

SEQ ID NO: 475 - protein, 362 aa, Artificial Sequence
  Modified TdT Sequence
MENLYFQGTVSQYACQRRTTMENHNQIFTDAFAILAENAEFNESEVPALAFRRAASLLKSLPHAISSSKDLEGLPCLGDQTKAVIEDILEYGQCSKVQDVLCDDRYQTIKLFTSVFGVGLKTAEKWYRKGFHSLEEVQADKAIQFTKMQKAGFLYYDDISAAVCKAEADAIGQIVEETVRLIAPDAIVTLTGGFRRGKECGHDVDFLITTPEMGKEQLLPKVINLLEKKGLLLYYDLVESTFDKARLPCRKFEAMDHFQKCFAIIKLKKELAAGRVQKDWKAIRVDFVMPPVDNFAFALLGWTGSRQFERDLRRFARHERKMLLDRHALYDKTKKIFLPAKTEEDIFAHLGLDYIPPWQRNA

SEQ ID NO: 476 - protein, 362 aa, Artificial Sequence
  Modified TdT Sequence
MENLYFQGTVSQYACQRRTTLENHNQIFTDAFAILAENAEFNESEGPALAFRRAASLLKSLPHAISSSKDLEGLPCLGEQTKAVIEDILEYGQCSKVQDVLCDDRYQTIKLFTSVFGVGLKTAEKWYRKGFHSLEEVQADKAIQFTKMQKAGFLYYDDISAAVCKAEADAIGQIVEETVRLIAPDAIVTLTGGFRRGKECGHDVDFLITTPEMGKEQLLPKVINLLEKKGLLLYYDLVESTFDKTRLPCRKFEAMDHFQKCFAIIKLKKELAAGRVQKDWKAIRVDFVMPPIDNFAFALLGWTGSRQFERDLRRFARHERKMLLDRHALYDKTKKIFLPAKTEEDIFAHLGLDYIPPWQRNA

SEQ ID NO: 477 - protein, 362 aa, Artificial Sequence
  Modified TdT Sequence
MENLYFQGTVSQYACQRRTTMENHNQIFTDAFAILAENAEFNESEGPALAFRRAASLLKSLPHAISSSKDLEGLPCLGDQTKGVIEDILEYGQCSKVQDVLCDDRYQTIKLFTSVFGVGLKTAEKWYRKGFHSLEEVQADKAIQFTKMQKAGFLYYDDISAAVCKAEADAIGQIVEETVRLIAPDAIVTLTGGFRRGKECGHDVDFLITTPEMGKEQLLPDLINLLEKKGLLLYYDLVESTFDKTRLPCRRFEAMDHFQKCFAIIKLKKELAAGRVQKDWKAIRVDFVMPPIDNFAFALLGWTGSRQFERDLRRFARHERKMLLDRHALYDKTKKIFLPAKTEEDIFAHLGLDYIPPWQRNA

SEQ ID NO: 478 - protein, 362 aa, Artificial Sequence
  Modified TdT Sequence
MENLYFQGTVSQYACQRRTTMENHNQIFTDAFAILAENAEFNESEGPALAFRRAASLLKSLPHAISSSKDLEGLPCLGDQTKAVIEDILEYGQCSKVQEVLCDDRYQTIKLFTSVFGVGLKTAEKWYRKGFHSLEEVQADKAIHFTKMQKAGFLYYDDISAAVCKAEADAIGQIVEETVRLIAPDALVTLTGGFRRGKECGHDVDFLITTPEMGKEQLLPDVINLLEKKGLLLYYDLVESTFDKTRLPCRKFEAMDHFQKCFAIIKLKKELAAGRVQKDWKAIRVDFVMPPIDNFAFALLGWTGSRQFERDLRRFARHERKMLLDRHALYDKTKKIFLPAKTEEDIFAHLGLDYIPPWQRNA

SEQ ID NO: 479 - protein, 362 aa, Artificial Sequence
  Modified TdT Sequence
MENLYFQGTVSQYACQRRTTMENHNQIFTDAFAILAENAEFNESEGPALAFRRAASLLKSLPHAISSSKDLEGLPCLGDQTKAVIEDILEYGQCSKVQEVLCDDRYQTIKLFTSVFGVGLKTAEKWYRKGFHSLEEVQADKAIQFTKMQKAGFLYYDDISAAVCKAEADAIGQIVEETVRLMAPDAIVTLTGGFRRGKECGHDVDFLITTPEMGKEQLLPDVINLLEKKGLLLYYDLVESTFDKTRLPCRKFEAMDHFQKCFAIIKLEKELAAGRVQKDWKAIRVDFVMPPIDNFAFALLGWTGSRQFERDLRRFARHERKMLLDRHALYDKTKKIFLPAKTEEDIFAHLGLDYIPPWQRNA

SEQ ID NO: 480 - protein, 362 aa, Artificial Sequence
  Modified TdT Sequence
MENLYFQGTVSQYACQRRTTMENHNQIFTDAFAILAENAEFNESEGPALAFRRAASLLKSLPHTISSSKDLEGLPCLGDQTKAVIEDILEYGQCSKVQDVLCDDRYQTIKLFTSVFGVGLKTAEKWYRKGFHSLEEVQADKAIQFTKMQKAGFLYYDDISAAVCKAEADAIGQIVEETVRLIAPDAIVTLTGGFRRGKSCGHDVDFLITTPEMGKEQLLPDVINLLEKKGLLLYYDLVESTFDKTRLPCRKFEAMDHFQKCFAIIKLKKELAAGRVQKDWKAIRVDFVMPPIDNFAFTLLGWTGSRQFERDLRRFARHERKMLLDRHALYDKTKKIFLPAKTEEDIFAHLGLDYIPPWQRNA

SEQ ID NO: 481 - protein, 362 aa, Artificial Sequence
  Modified TdT Sequence
MENLYFQGTVSQYACQRRTTMENHNQIFTDAFAILAENAEFNESEGPCLAFRRAASLLKSLPHAISSSKDLEGLPCLGDQTKAVIEDILEYGQCSKVQDVLCDDRYQTIKLFTSVFGVGLKTAEKWYRKGFHSLEEVQADKAIQFTKMQKAGFLYYDDISAAVCKAEADAIGQVVEETVRLIAPDAIVTLTGGFRRGKEIGHDVDFLITTPEMGKEQLLPRVINLLEKKGLLLYYDLVESTFDKTRLPCRKFEAMDHFQKCFAIIKLKKELADGRVQKDWKAIRVDFVMPPVDNFAFALLGWTGSRQFERDLRRFARHERKMLLDRHALYDKTKKIFLPAKTEEDIFAHLGLDYIPPWQRNA

SEQ ID NO: 482 - protein, 362 aa, Artificial Sequence
  Modified TdT Sequence
MENLYFQGTVSQYACQRRTTMENHNQIFTDAFAILAENAEFNESEGPCLAFRRAASLLKSLPHAISSSKDLEGLPCLGDQTKAVIEDILECGQCSKVQDVLCDDRYQTIKLFTSVFGVGLKTAEKWYRKGFHSLEEVQADKAIHFTKMQKAGFLYYDDISAAVCKAEADAIGQIVEETVRLIAPDAIVTLTGGFRRGKECGHDVDFLITTPEMGKEQLLPKVINLWEQKGLLLYYDLVESTFDKTRLPCRKFEAMDHFQKCFAIIKLKKELAAGRVQKDWKAIRVDFVMPPVDCFAFALLGWTGSRQFERDLRRFARHERKMLLDRHALYDKTKKIFLPAKTEEDIFAHLGLDYIPPWQRNA

SEQ ID NO: 483 - protein, 362 aa, Artificial Sequence
  Modified TdT Sequence
MENLYFQGTVSQYACQRRTTMENHNQIFTDAFAILAENAEFNESEGPCVAFRRAASLLKSLPHAISSSKDLEGLPCLGDQTKAVIEDILEYGQCSKVQDVLCDDRYQTIKLFTSVFGVGLKTAEKWYRKGFHSFEEVQADKAIHFTKMQKAGFLYYDDISAAVCKAEADAIGQIVEETVRLIAPDAIVTLTGGFRRGKECGHDVDFLITTPEMGKEQLLPKVINLWEKKGLLLYYDLVESTFDKTRLPCRKFEAMDHFQKCFAIIKLKKELADGRVQKDWKAIRVDFVMPPVDNFAFALLGWTGSRQFERDLRRFARHERKMLLDRHALYDKTKKIFLPAKTEEDIFAHLGLDYIPPWQRNA

SEQ ID NO: 484 - protein, 362 aa, Artificial Sequence
  Modified TdT Sequence
MENLYFQGTVSQYACQRRTTMENHNQIFTDAFAILAENAEFNESEGPCLAFRRAASLLKSLPHAISSSKDLEGLPCLGDQTKAVIEDILEYGQCSKVQDVLCDDRYQTIKLFTSVFGVGLKTAEKWYRKGFHSLEEVQADKAIQFTKMQKAGFLYYDDISAAVCKAEADAIGQIVEETVRLIAPDAIVTLTGGFRRGKNCGHDVDFLITTPEMGKEQLLPKVINLWEKKGLLLYYDLVESTFDKTRLPCRKFEAMDHFQKCFAIIKLKKELAAGRVQKDWKAIRVDFVMPPVDNYAFALLGWTGSRQFERDLRRFARHERKMLLDRHALYDKTKKIFLPAKTEEDIFAHLGLDYIPPWQRNA

SEQ ID NO: 485 - protein, 362 aa, Artificial Sequence
  Modified TdT Sequence
MENLYFQGTVSQYACQRRTTMENHNQIFTDAFAILAENAEFNESEGPALAFRRAASLLKSLPHAISSSKDLEGLPCLGDQTKAVIEDILEYGQCSKVQDVLCDDRYQTIKLFTSVFGVGLKTAEKWYRKGFHSLEEVQADKAIQFTKMQKAGFLYYDDISAAVCKAEADAIGQIVEETVRLIAPDAIVTLTGGFRRGKECGHDVDFIITTPEMGKEQLLPDVINLLEKKGLLLYYDLVESTFDKTRLPSRKFEAMDHFQKCFAIIKLKKELAAGRVQKDWKAIRVDFVMPPADNFAFALLGWTGSRQFERDLRRFARHERKMLLDRHALYDKTKKIFLPAKTEEDIFAHLGLDYIPPWQRNA

SEQ ID NO: 486 - protein, 362 aa, Artificial Sequence
  Modified TdT Sequence
MENLYFQGTVSQYACQRRTTMENHNQIFTDAFAILAENAEFNESEGPALAFRRAASLLKSLPHAILSSKDLEGLPCLGDQTKAVIEDILEYGQCSKVQDVLCDDRYKTIKLFTSVFGVGLKTAEKWYRKGFHSLEEVQADKAIQFTKMQKAGFLYYDDISAAVCKAEADAIGQIVEETVRLIAPDAIVTLTGGFRRGKECGHDVDFLITTPEMGKEQLLPDVINLLEKKGLLLYYDLVESTFDKTRLPCRKFEAMDHFQKCFAIIKLKKELAAGRVQKDWKAIRVDFVMPPADNFAFALLGWTGSRQFERDLRRFARHERKMLLDRHALYDKTKKIFLPAKTEEDIFAHLGLDYIPPWQRNA

SEQ ID NO: 487 - protein, 362 aa, Artificial Sequence
  Modified TdT Sequence
MENLYFQGTVSQYACQRRTTMENHNQIFTDAFAILAENAEFNESEGPALAFRRAASLLKSLPHAISSSKDLEGLPCLGDQTKAVIEDILEYGQCSKVQDVLCDDRYQTIKLFTSVFGVGLKTAEKWYRMGFHSLEEVQADKAIHFTKMQKAGFLYYDDISAAVCKAEADAIGQIVEETVRLIAPDAIVTLTGGFRRGKEIGHDVDFLITTPEMGKEQLLPKVINLLEKKGLLLYYDLVESTFDKARLPCRKFEAMDHFQKCFAIIKLKKELAAGRVQKDWKAIRVDFVMPPVDNFAFALLGWTGSRQFERDLRRFARHERKMLLDRHALYDKTKKIFLPAKTEEDIFAHLGLDYIPPWQRNA

SEQ ID NO: 488 - protein, 362 aa, Artificial Sequence
  Modified TdT Sequence
MENLYFQGTVSQYACQRRTTMENHNQIFTDAFAILAENAEFNESEGPCLAFRRAASLLKSLPHAISSSKDLEGLPCLGDQTKAVIEDILEYGQCSKVQDVLCDDRYQTIKLFTSVFGVGLKTAEKWYRKGFHSLEEVQADKAIHFTKMQKAGFLYYDDISAAVCKAEADAIGQIVEETVRLIAPDAIVTLTGGFRRGKECGHDVDFLITTPEAGREQLLPKVINLWEKKGLLLYYDLVESTFDKTRLPCRKFEAMDHFQKCFAIIKLKKELAAGRVQKDWKAIRVDFVMPPVDRFAFALLGWTGSRQFERDLRRFARHERKMLLDRHALYDKTKKIFLPAKTEEDIFAHLGLDYIPPWQRNA

SEQ ID NO: 489 - protein, 362 aa, Artificial Sequence
  Modified TdT Sequence
MENLYFQGTVSQYACQRRTTMENHNQIFTDAFAILAENAEFNESEGPALAFRRAASLLKSLPHAISSSKDLEGLPCLGDQTKAVIEEILEYGQCSKVQDVLCDDRYQTIKLFTSVFGVGLKTAEKWYRKGFHSLEEVQADKAIQFTKMQKAGFLYYDDISAAVCKAEADAIGQIVEETVRLIAPDALVTLTGGFRRGKECGHDVDFLITTPEQGKEQLLPDVINLLEKKGLLLYYDLVESTFDKTRLPCRKFEAMDHFQKCFAIIKLKKELAAGRVQKDWKAIRVDFVMPPIDNFAFALLGWTGSRQFERDLRRFARHERKMLLDRHALYDKTKKIFLPAKTEEDIFAHLGLDYIPPWQRNA

SEQ ID NO: 490 - protein, 362 aa, Artificial Sequence
  Modified TdT Sequence
MENLYFQGTVSQYACQRRTTMENHNQVFTDAFAILAENAEFNESEGPCLAFRRAASLLKSLPHAISSSKDLEDLPCLGDQTKAVIEDILEYGQCSKVQDVLCDDRYQTIKLFTSVFGVGLKTAEKWYRKGFHSLEEVQADKAIHFTKMQKAGFLYYDDISAAVCKAEADAIGQIVEETVRLIAPDAIVTLTGGFRRGKEIGHDVDFLITTPEAGKEQLLPRVINLLEKKGLLLYYDLVESTFDKTRLPCRKFEAMDHFQKCFAIIKLKKELAAGRVQKDWKAIRVDFVMPPVDNFAFALLGWTGSRQFERDLRRFARHERKMLLDRHALYDKTKKIFLPAKTEEDIFAHLGLDYIPPWQRNA

SEQ ID NO: 491 - protein, 362 aa, Artificial Sequence
  Modified TdT Sequence
MENLYFQGTVSQYACQRRTTMENHNQIFTDAFAILAENAEFNESEGPCLAFRRAASLLKSLPHAISSSKDLEGLPCLGDQTKAVIEDILEYGQCSKAQDVLCDDRYQTIKLFTSVFGVGLKTAEKWYRKGFHSLEEVQADKAIHFTKMQKAGFLYYDDISAAVCKAEADAIGQIVEETVRLIAPDAIVTLTGGFRRGKNIGHDVDFLITTPEMGKEQLLPKVINLWEKKGLLLYYDLVESTFDKTRLPCRKFEAMDHFQKCFAIIKLKKELAAGRVQKDWKAIRVDFVMPPVDNFAFALLGWTGSRQFERDLRRFARHERKMLLDRHALYDKTKKIFLPAKTEEDIFAHLGLDYIPPWQRNA

SEQ ID NO: 492 - protein, 362 aa, Artificial Sequence
  Modified TdT Sequence
MENLYFQGTVSQYACQRRTTMENHNQIFTDAFAILAENAEFNESEGPALAFRRAASLLKSLPHAISSSKDLEGLPCLGDQTKAVIEDILEYGQCSKVQDVLCDDRYQTIKLFTSVFGVGLKTAEKWYRKGFHSLEEVQADKAIQFTKMQRAGFLYYDDISAAVCKAEADAIGQIVEETVRLIAPDALVTLTGGFRRGKEIGHDVDFLITTPEMGKEQLLPKVINLLEKKGLLLYYDLVESTFDKTRLPCRKFEAMDHFQKCFAIIKLKKELAAGRVQKDWKAIRVDFVMPPVDNFAFALLGWTGSRQFERDLRRFARHERKMLLDRHALYDKTKKIFLPAKTEEDIFAHLGLEYIPPWQRNA

SEQ ID NO: 493 - protein, 362 aa, Artificial Sequence
  Modified TdT Sequence
MENLYFQGTVSQYACQRRTTMENHNQIFTDAFAILAENAEFNESEGPCLAFRRAASLLKSLPHAISSSKDLEGLPCLGDQTKAVIEDILEYGQCSKVQDVLCDDRYQTIKLFTSVFGVGLKTAEKWYRKGFHSLEEVQADKAIHFTKMQKAGFLYYDDISAAVCKAEADAIGQIVEETVRLIAPDAIVTLTGGFRRGKEIGHDVDFLITTPEMGKEQLLPRVINLWEKKGLLLYYDLVESTFDKTRLPCRKFEAMDHFQKCFAIIKLKKELAAGRVQKDWKAIRVDFVMPPVDNFAFALLGWTGSRQFERDLRRFARHERKMLLDRHALYDKTKKIFLPAKSEEEIFAHLGLDYIPPWQRNA

SEQ ID NO: 494 - protein, 362 aa, Artificial Sequence
  Modified TdT Sequence
MENLYFQGTVSQYACQRRTTMENHNQIFTDAFAILAENAEFNESEGPALAFRRAASLLKSLPHAISSSKDLEGLPCLGDQTKAVIEEILEYGQCSKVQDVLCDDRYQTIKLFTSVFGVGLKTAEKWYRKGFHSLEEVQADKAIQFTKMQKAGFLYYDDISAAVCKAEADAIGQIVEETVRLIAPDAIVTLTGGFRRGKECGHDVDFLITTPEMGKEQLLPDVINLLEKKGLLLYYDLVESTFDKTRLPCRKFEAMDHFQKCFAIIKLNKELAAGRVQKDWKAIRVDFVMPPADNFAFALLGWTGSRQFERDLRRFARHERKMLLDRHALYDKTKKIFLPAKTEEDIFAHLGLDYIPPWQRNA

SEQ ID NO: 495 - protein, 362 aa, Artificial Sequence
  Modified TdT Sequence
MENLYFQGTVSQYACQRRTTMENHNQIFTDAFAILAENAEFNESEGPALAFRRAASLLKSLPHAISSSKDLEGLPCLGDQTKAVIEDILEYGQCSKVQDVLCDDRYQTIKLFTSVFGVGLKTAEKWYRKGFHSLEEVQADKAIQFTKMQKAGFLYYDDISAAVCKAEADAIGQIVEETVRLIAPDAIVTLTGGFRRGKECGHDVDFLITTPEQGKEQLLPDVINLLEKKGLLLYYDLVESTFDKTRLPSRKFEAMDHFQKCFAIIKLKKELAAGCVQKDWKAIRVDFVMPPIDNFAFALLGWTGSRQFERDLRRFARHERKMLLDRHALYDKTKKIFLPAKTEEDIFAHLGLDYIPPWQRNA

SEQ ID NO: 496 - protein, 362 aa, Artificial Sequence
  Modified TdT Sequence
MENLYFQGTVSQYACQRRTTMENHNQIFTDAFAILAENAEFNESEGPCLAFRRAASLLKSLPHAISSSKDLEGLPCLGDQTKAVIEDILECGQCSKVQDVLCDDRYQTIKLFTSVFGVGLKTAEKWYRKGFHSLEEVQADKAIHFTKMQKAGFLYYDDISAAVCKAEADAIGQIVEETVRLIAPDAIVTLTGGFRRGKECGHDVDFLITTPEMGKEQLLPKVINLWEKKGLLLYYDLVESTFDKTRLPCRKFEAMDHFQKCFAIIKLKAELAAGRVQKDWKAIRVDFVMPPVDNFAFALLGWTGSRQFERDLRRFARHERRMLLDRHALYDKTKKIFLPAKTEEDIFAHLGLDYIPPWQRNA

SEQ ID NO: 497 - protein, 362 aa, Artificial Sequence
  Modified TdT Sequence
MENLYFQGTVSQYACQRRTTMENHNQIFTDAFAILAENAEFNESEGPALAFRRAASLLKSLPHAISSSKDLEGLPCLGDQTKGVIEDILEYGQCSKVQDVLCDDRYQTIKLFTSVFGVGLKTAEKWYRMGFHSLEEVQADKAIQFTKMQRAGFLYYDDISAAVCKAEADAIGQIVEETVRLIAPDAIVTLTGGFRRGKEIGHDVDFLITTPEMGKEQLLPKVINLLEKKGLLLYYDLVESTFDKTRLPCRKFEAMDHFQKCFAIIKLKKELAAGRVQKDWKAIRVDFVMPPVDNFAFALLGWTGSRQFERDLRRFARHERKMLLDRHALYDKTKKIFLPAKTEEDIFAHLGLDYIPPWQRNA

SEQ ID NO: 498 - protein, 362 aa, Artificial Sequence
  Modified TdT Sequence
MENLYFQGTVSQYACQRRTTMENHNQIFTDAFAILAENAEFNESEGPCVAFRRAASLLKSLPHAISSSKDLEGLPCLGDQTKAVIEDILEYGQCSKVQDVLCDDRYQTIKLFTSVFGVGLKTAEKWYRKGFHSLEEVQADKAIHFTKMQKAGFLYYDDISAAVCKAEADAIGQIVEETVRLIAPDAIVTLTGGFRRGKEIGHDVDFLITTPEMGKEQLLPRVINLLEKKGLLLYYDLVESTFDKTRLPCRKFEAMDHFQKCFAIIKLKKELAAGRVQKDWKAIRVDFVLPPVDNFAFALLGWTGSRQFERDLRRFARHERKMLLDRHALYDKTKKIFLPAKTEEDIFAHLGLDYIDPWQRNA

SEQ ID NO: 499 - protein, 362 aa, Artificial Sequence
  Modified TdT Sequence
MENLYFQGTVSQYACQRRTTMENHNQIFTDAFAILAENAEFNESEGPALAFRRAASLLKSLPHAISSSKDLEGLPCLGDQTKAVIEDILEYGQCSKVQDVLCDDRYQTIKLFTSVFGVGLKTAEKWYRKGFHSLEEVQADKAIQFTKMQKAGFLYYDDISAAVCKAEADAIGQIVEETVRLIAPDAIVTLTGGFRRGKEIGHDVDFLITTPEAGKEQLLPKVINLLEKKGLLLYYDLVESTFDIARLPCRKFEAMDHFQKCFAIIKLKKELAAGRVQKDWKAIRVDFVMPPVDNFAFALLGWTGSRQFERDLRRFARHERKMLLDRHALYDKTKKIFLPAKTEEDIFAHLGLDYIPPWQRNA

SEQ ID NO: 500 - protein, 362 aa, Artificial Sequence
  Modified TdT Sequence
MENLYFQGTVSQYACQRRTTMENHNQIFTDAFAILAENAEFNESEGPALAFRRAASLLKSLPHAISSSKDLEGLPCLGDQTKAVIEDILEYGQCSKVQDVLCDDRYKTIKLFTSVFGVGLKTAEKWYRKGFHSLEEVQADRAIQFTKMQKAGFLYYDDISAAVCKAEADAIGQIVEETVRLIAPDAIVTLTGGFRRGKECGHDVDFLITTPEMGKEQLLPKVINLLEKKGLLLYYDLVESTFDKTRLPCRKFEAMDHFQKCFAIIKLKKELAAGRVQKDWKAIRVDFVMPPIDNFAFALLGWTGSRQFERDLRRFARHERKMLLDRHALYDKTKKIFLPAKTEEDIFAHLGLDYIPPWQRNA

SEQ ID NO: 501 - protein, 362 aa, Artificial Sequence
  Modified TdT Sequence
MENLYFQGTVSQYACQRRTTMENHNQVFTDAFAILAENAEFNESEGPALAFLRAASLLKSLPHAISSSKDLEGLPCLGDQTKAVIEDILEYGQCSKVQDVLCDDRYQTIKLFTSVFGVGLKTAEKWYRKGFHSLEEVQADKAIHFTKMQKAGFLYYDDISAAVCKAEADAIGQIVEETVRLIAPDAIVTLTGGFRRGKEIGHDVDFLITTPEMGKEQLLPRVINLLEKKGLLLYYDLVESTFDKTRLPCRKFEAMDHFQKCFAIIKLKKELAAGRVQKDWKAIRVDFVMPPVDNFAFALLGWTGSRQFERDLRRFARHERKMLLDRHALYDKTKKIFLPAKTEEDIFAHLGLDYIPPWQRNA

SEQ ID NO: 502 - protein, 362 aa, Artificial Sequence
  Modified TdT Sequence
MENLYFQGTVSQYACQRRTTMENHNQIFTDAFAILAENAEFNESEGPCLAFRRAASLLKSLPHAISSSKDLEGLPCLGDQTKAVIEDILEYGQCSKVQDVLCDDRYQTIKLFTSVFGVGLKTAEKWYRKGFHSLEEVQADKAIHFTKMQKAGFLYYDDISAAVCKAEADAIGQIVEETVRLIAPDAIVTLTGGFRRGKEIGHDVDFLITTPEMGKEQLLPRVIDLLEKKGLLLYYDLVESTFDKTRLPCRKFEAMDHFQKCFAIIKLKKELAAGRVQKDWKAIRVDFVLPPVDNFAFALLGWTGSRQFERDLRRFARHERKMLLDRHALYDKTKKIFLPAKTEEDIFAHLGLDYVPPWQRNA

SEQ ID NO: 503 - protein, 362 aa, Artificial Sequence
  Modified TdT Sequence
MENLYFQGTVSQYACQRRTTMENHNQIFTDAFAILAENAEFNESEGPALAFRRAASLLKSLPHAISSSKDLEGLPCLGDQTKAVIEDILEYGQCSKVQDVLCDDRYQTIKLFTSVFGVGLKTAEKWYRKGFHSLEEVQADKAIQFTKMQKAGFLYYDDISAAVCKAEADAIGQIVEETVRLIAPDAIVTLTGGFRRGKEIGHDVDFLITTPEQGKEQLLPKLINLLEKKGLLLYYDLVESTFDKTRLPCRKFEAMDHFQKCFAIIKLKKEQAAGRVQKDWKAIRVDFVMPPVDNFAFALLGWTGSRQFERDLRRFARHERKMLLDRHALYDKTKKIFLPAKTEEDIFAHLGLDYIPPWQRNA

SEQ ID NO: 504 - protein, 362 aa, Artificial Sequence
  Modified TdT Sequence
MENLYFQGTVSQYACQRRTTMENHNQIFTDAFAILAENAEFNESEGPCLAFRRAASLLKSLPHAISSSKDLEGLPCLGDQTKAVIEDILEYGQCSKVQDVLCDDRYQTIKLFTSVFGVGLKTAEKWYRKGFHSLEEVQADKAIHFTKMQKAGFLYYDDISAAVCKAEADAIGQIVEETVHLIAPDAIVALTGGFRRGKEIGHDVDFLITTPEMGKEQLLPRVINLLEKKGLLLYYDLVESTFDKTRLPCRKFEAMDHFQKCFAIIKLKKELAAGRVQKDWKAIRVDFVMPPVDNFAFALLGWTGSRQFERDLRRFARHERKMLLDRHALYDKTKRIFLPAKTEEDIFAHLGLDYIPPWQRNA

SEQ ID NO: 505 - protein, 362 aa, Artificial Sequence
  Modified TdT Sequence
MENLYFQGTVSQYACQRRTTMENHNQVFTDAFAILAENAEFRESEGPALAFRRAASLLKSLPHAISSSKDLEGLPCLGDQTKAVIEDILEYGQCSKVQDVLCDDRYQTIKLFTSVFGVGLKTAEKWYRKGFHSLEEVQADKAIQFTKMQKAGFLYYDDISAAVCKAEADAIGQIVEETVRLIAPDAIVTLTGGFRRGKEIGHDVDFLITTPEMGKEQLLPKVINLLEQKGLLLYYDLVESTFDKTRLPCRKFEAMDHFQKCFAIIKLKKELAAGRVQKDWKAIRVDFVMPPVDNFAFALLGWTGSRQFERDLRRFARHERKMLLDRHALYDKTKKIFLPAKTEEEIFAHLGLDYIPPWQRNA

SEQ ID NO: 506 - protein, 362 aa, Artificial Sequence; identical to SEQ ID NO: 391
  Modified TdT Sequence

SEQ ID NO: 507 - protein, 362 aa, Artificial Sequence
  Modified TdT Sequence
MENLYFQGTVSQYACQRRTTMENHNQIFTDAFAILAENAEFNESEGPALAFRRAASLLKSLPHAISSSKDLEGLPCLGDQTKAVIEDILEYGQCSKVQDVLCDDRYQTIKLFTSVFGVGLKTAEKWYRMGFHSLEEVQADRAIQFTKMQKAGFLYYDDISAAVCKAEADAIGQIVEETVRLIAPDAIVTLTGGFRRGKEIGHDVDFLITTPEAGKEQLLPKVINLLEQKGLLLYYDLVESTFDKTRLPCRKFEAMDHFQKCFAIIKLKKELAAGRVQKDWKAIRVDFVMPPVDNFAFALLGWTGSRQFERDLRRFARHERKMLLDRHALYDKTKKIFLPAKTEEDIFAHLGLDYIPPWQRNA

SEQ ID NO: 508 - protein, 362 aa, Artificial Sequence
  Modified TdT Sequence
MENLYFQGTVSQYACQRRTTMENHNQIFTDAFAILAENAEFNESESPCLAFRRAASLLKSLPHAISSSKDLEGLPCLGDQTKAVIEDILEYGQCSKVQDVLCDDRYQTIKLFTSVFGVGLKTAEKWYRKGFHSLEEVQADKAIHFTKMQKAGFLYYDDISAAVCKAEADAIGQIVEETVRLIAPDAIVTLTGGFRRGKEIGHDVDFLITTPEMGKEQLLPRVINLLEQKGLLLYYDLVESTFDKTRLPCRKFEAMDHFQKCFAIIKLKKELAAGRVQKDWKAIRVDFVMPPVDNFAFALLGWTGSRQFERDLRRFARHERKMLLDRHALYDKTKKIFLPAKTEEDIFAHLGLDYIDPWQRNA

SEQ ID NO: 509 - protein, 362 aa, Artificial Sequence
  Modified TdT Sequence
MENLYFQGTVSQYACQRRTTMENHNQVFTDAFAILAENAEFNESEGPALAFRRAASLLKSLPHAISSSKDLEGLPCLGDQTKAVIEDILEYGQCSKVQDVLCDDRYQTIKLFTSVFGVGLKTAEKWYRMGFHSLEEVQADKAIQFTKMQKAGFLYYDDISAAVCKAEADAIGQIVEETVRLIAPDAIVTLTGGFRRGKEIGHDVDFLITTPEMGKEQLLPKVINLLEKKGLLLYYDLIESTFDKTRLPCRKFEAMDHFQKCFAIIKLKKELAAGRVQKDWKAIRVDFVMPPVDNFAFALLGWTGSRQFERDLRRFARHERKMLLDRHALYDKTKKIFLPAKTEEDIFAHLGLDYIPPWQRNA

SEQ ID NO: 510 - protein, 362 aa, Artificial Sequence
  Modified TdT Sequence
MENLYFQGTVSQYACQRRTTMENHNQIFTDAFAILAENAEFNESEGPALAFRRAASLLKSLPHAISSSKDLEGLPCLGDQTKAVIEDILEYGQCSKVQDVLCDDRYKTIKLFTSVFGVGLKTAEKWYRKGFHSLEEVQADKAIQFTKMQKAGFLYYDDISAAVCKAEADAIGQIVEETVRLIAPDAIVTLTGGFRRGKECGHDVDFLITTPEMGKEQLLPDVINLLEKKGLLLYYDLVESTFDKTRLPCRKFEAMDHFQKCFAIIKLEKERAAGRVQKDWKAIRVDFVMPPIDNFAFALLGWTGSRQFERDLRRFARHERKMLLDRHALYDKTKKIFLPAKTEEDIFAHLGLDYIPPWQRNA

SEQ ID NO: 511 - protein, 362 aa, Artificial Sequence
  Modified TdT Sequence
MENLYFQGTVSQYACQRRTTMENHNQIFTDAFAILAENAEFNESEGPCLAFRRAASLLKSLPHAISSSKDLEGLPCLGDQTKAVIEDILEYGQCSKVQDVLCDDRYQTIKLFTSVFGVGLKTAEKWYRMGFHSLEEVQADKAIHFTKMQKAGFLYYDDISAAVCKAEADAIGQIVEETVRLIAPDAIVTLTGGFRRGKEIGHDVDFLITTPEMGKEQLLPRVINLWEQKGLLLYYDLVESTFDKTRLPCRKFEAMDHFQKCFAIIKLKKELAAGRVQKDWKAIRVDFVMPPIDNFAFALLGWTGSRQFERDLRRFARHERKMLLDRHALYDKTKKIFLPAKTEEDIFAHLGLDYIPPWQRNA

SEQ ID NO: 512 - protein, 362 aa, Artificial Sequence
  Modified TdT Sequence
MENLYFQGTVSQYACQRRTTMENHNQIFTDAFAILAENAEFNESEGPCLAFRRAASLLKSLPHAIISSKDLEGLPCLGDQTKAVMEDILEYGQCSKVQDVLCDDRYQTIKLFTSVFGVGLKTAEKWYRKGFHSLEEVQADKAIQFTKMQKAGFLYYDDISAAVCKAEADAIGQIVEETVRLIAPDAIVTLTGGFRRGKECGHDVDFLITTPEMGKEQLLPKVINLWEKKGLLLYYDLVESTFDKTRLPCRKFEAMDHFQKCFAIIKLKKELAAGRVQKDWKAIRVDFVMPPVDNFAFALLGWTGSRQFERDLRRFARHERKMLLDRHALYDKTKKIFLPAKTEEDIFAHLGLDYIPPWQRNA

SEQ ID NO: 513 - protein, 362 aa, Artificial Sequence
  Modified TdT Sequence
MENLYFQGTVSQYACQRRTTMENHNQIFTDAFAILAENAEFNESEGPCLAFRRAASLLKSLPHAISSSKDLEGLPCLGDQTKAVIEDILEYGQCSKVQDVLCDDRYQTIKLFTSVFGVGLKTAEKWYRKGFHSLEEVQADNAIHFTKMQKAGFLYYDDISAAVCKAEADAIGQIVEETVRLIAPDAIVTLTGGFRRGKECGHDVDFLITTPEMGREQLLPKVINLWEKKGLLLYYDLVESTFDKLRLPCRKFEAMDHFQKCFAIIKLKKELAAGRVQKDWKAIRVDFVMPPVDNFAFALLGWTGSRQFERDLRRFARHERKMLLDRHALYDKTKKIFLPAKTEEDIFAHLGLDYIPPWQRNA

SEQ ID NO: 514 - protein, 362 aa, Artificial Sequence
  Modified TdT Sequence
MENLYFQGTVSQYACQRRTTMENHNQIFTDAFAILAENAEFNENEGPALAFRRAASLLKSLPHAISSSKDLEGLPCLGDQTKGVIEDILEYGQCSKVQDVLCDDRYKTIKLFTSVFGVGLKTAEKWYRKGFHSLEEVQADKAIQFTKMQKAGFLYYDDISAAVCKAEADAIGQIVEETVRLIAPDAIVTLTGGFRRGKEIGHDVDFLITTPEMGKEQLLPKVINLLEQKGLLLYYDLVESTFDKTRLPCRKFEAMDHFQKCFAIIKLKKELAAGRVQKDWKAIRVDFVMPPVDNFAFALLGWTGSRQFERDLRRFARHERKMLLDRHALYDKTKKIFLPAKTEEDIFAHLGLDYIPPWQRNA

SEQ ID NO: 515 - protein, 362 aa, Artificial Sequence
  Modified TdT Sequence
MENLYFQGTVSQYACQRRTTMENHNQIFTDAFAILAENAEFNESEGPCLAFRRAASLLKSLPHAIISSKDLEGLPCLGDQTKAVIEDILEYGQCSKVQDVLCDDRYQTIKLFTSVFGVGLKTAEKWYRKGFHSLEEVQADKAIHFTKMQKAGFLYYDDISAAVCKAEADAIGQIVEETVRLIAPDAIVTLTGGFRRGKECGHDVDFLITTPGMGKEQLLPKVINLWEKKGLLLYYDLVESTFDKTRLPCRKFEAMDHFQKCFAIIKLKKELAAGRVQKDWKAIRVDFVMPPVDNFAFALLGWTGSRQFERDLRRFARHERKMLLDRHALYDRTKKIFLPAKTEEDIFAHLGLDYIPPWQRNA

SEQ ID NO: 516 - protein, 362 aa, Artificial Sequence
  Modified TdT Sequence
MENLYFQGTVSQYACQRRTTMENHNQIFTDAFAILAENAEFNESEGPCLAFRRAASLLKSLPHAISSSKDLEGLPCLGDQTKAVIEDILEYGQCSKVQDVLCDDRYQTIKLFTSVFGVGLKTAEKWYRKGFHSLEEVQADKAIQFTKMQKAGFLYYDDISAAVCKAEADAIGQIVEETVRLIAPDAIVTLTGGFRRGKECGHDVDFLITTPEMGKEQLLPDVMNLLEKKELLLYYDLVESTFDKTRLPCRKFEAMDHFQKCFAIIKLKKELAAGRVQKDWKAIRVDFVMPPIDNFAFALLGWTGSRQFERDLRRFARHERKMLLDRHALYDKTKKIFLPAKTEEDIFAHLGLEYIPPWQRNA

SEQ ID NO: 517 - protein, 362 aa, Artificial Sequence
  Modified TdT Sequence
MENLYFQGTVSQYACQRRTTMENHNQIFTDAFAILAENAEFNESEGPALAFRRAASLLKSLPHAISSSKDLEGLPCLGDQTKAVIEDILEYGQCSKVQDVLCDDRYQTIKLFTSVFGVGLKTAEKWYRKGFHSLEEVQADKAIQFTKMQKAGFLYYDDISAAVCKAEADAIGQIVEETVRLIAPDAIVTLTGGFRRGKECGHDVDFLITTAEMGKEQLLPDVINLLEKKELLLYYHLVESTFDKTRLPCRKFEAMDHFQKCFAIIKLKKELAAGRVQKDWKAIRVDFVMPPIDNFAFALLGWTGSRQFERDLRRFARHERKMLLDRHALYDKTKKIFLPAKTEEDIFAHLGLDYIPPWQRNA

SEQ ID NO: 518 - protein, 362 aa, Artificial Sequence
  Modified TdT Sequence
MENLYFQGTVSQYACQRRTTMENNNQIFTDAFAILAENAEFNESEGPCLAFRRAASLLKSLPHAISSSKDLEGLPCLGDQTKAVIEDILEYGQCSKVQDVLCDDRYQTIKLFTSVFGVGLKTAEKWYRKGFHTLEEVQADKAIHFTKMQKAGFLYYDDISAAVCKAEADAIGQVVEETVRLIAPDAIVTLTGGFRRGKEIGHDVDFLITTPEMGKEQLLPRVINLLEKKGLLLYYDLVESTFDKTRLPCRKFEAMDHFQKCFAIIKLKKELAAGRVQKDWKAIRVDFVMPPVDNFAFALLGWTGSRQFERDLRRFARHERKMLLDRHALYDKTKKIFLPAKTEEDIFAHLGLDYIPPWQRNA

SEQ ID NO: 519 - protein, 362 aa, Artificial Sequence
  Modified TdT Sequence
MENLYFQGTVSQYACQRRTTMENHNQIFTDAFAILAENAEFNESEGPALAFRRAASLLKSLPHAISSSKDLEGLPCLGDQTKAVIEDILEYGQCSKVQDVLCDDRYKTIKLFTSVFGVGLKTAEKWYRKGFHSLEEVQADKAIQFTKMQKAGFLYYDDISAAVCKAEADAIGQIVEETVRLIAPDAIVTLTGGFRRGKEIGHDVDFLITTPEMGKEQLLPKVINLLEKKGLLLYYDLVESTFDKTRLPCRKFEAMDHFQKCFAIIKLKKERAAGRVQKDWKAIRVDFVMPPIDNFAFALLGWTGSRQFERDLRRFARHERKMLLDRHALYDKTKKIFLPAKTEEDIFAHLGLDYIPPWQRNA

SEQ ID NO: 520 - protein, 362 aa, Artificial Sequence
  Modified TdT Sequence
MENLYFQGTVSQYACQRRTTMENHNQIFTDAFAILAENAEFNESEGPCLAFLRAASLLKSLPHAISSSKDLEGLPCLGDQTKAVIEDILEYGQCSKVQDVLCDDRYQTIKLFTSVFGVGLKTAEKWYRKGFHSLEEVQADKAIHFTKMQKAGFLYYDDISAAVCKAEADAIGQIVEETVRGIAPDAIVTLTGGFRRGKECGHDVDFLITTPGMGKEQLLPKVINLWEKKGLLLYYDLVESTFDKTRLPCRKFEAMDHFQKCFAIIKLKKELAAGRVQKDWKAIRVDFVMPPVDNFAFALLGWTGSRQFERDLRRFARHERKMLLDRHALYDKTKKIFLPAKTEEDIFAHLGLDYIPPWQRNA

SEQ ID NO: 521 - protein, 362 aa, Artificial Sequence
  Modified TdT Sequence
MENLYFQGTVSQYACQRRTTMENHNQIFTDAFAILAENAEFNESEGPCLAFRRAASLLKSLPHAIISSKDLEGLPCLGDQTKAVIEDIIEYGQCSKVQDVLCDDRYQTIKLFTSVFGVGLKTAEKWYRKGFHSLEEVQADKAIHFTKMQKAGFLYYDDISAAVCKAEADAIGQIVEETVRLIAPDAIVTLTGGFRRGKECGHDVDFLITTPEMGKEQLLPKVINLWEKKGLLLYYDLVESTFDKTRLPCRKFEAMDHFQKCFAIIKLKKQLAAGRVQKDWKAIRVDFVMPPVDNFAFALLGWTGSRQFERDLRRFARHERKMLLDRHALYDKTKKIFLPAKTEEDIFAHLGLDYIPPWQRNA

SEQ ID NO: 522 - protein, 362 aa, Artificial Sequence
  Modified TdT Sequence
MENLYFQGTVSQYACQRRTTMENHNQIFTDAFAILAENAEFNESEGPALAFRRAASLLKSLPHAISSSKDLQGLPCLGDQTKAVIEDILEYGQCSKVQDVLCDDRYQTIKLFTSVFGVGLKTAEKWYRKGFHSLEEVQADKAIHFTKMQKAGFLYYDDISAAVCKAEADAIGQIVEETVRLIAPDAIVTLTGGFRRGKECGHDVDFLITTPGMGKEQLLPKVINLWEKKGLLLYYDLVESTFDKTRLPCRKFEAMDHFQKCFAIIKLKKELAAGRVQKDWKAIRVDFVMPPVDNFAFALLGWTGSRQFERDLRRFARHERKMLLDRHALYDKTKKIFLPAKTEEDIFAHLGLDYIPPWQRNA

SEQ ID NO: 523 - protein, 362 aa, Artificial Sequence
  Modified TdT Sequence
MENLYFQGTVSQYACQRRTTMENHNQIFTDAFAILAENAEFNESEGPCLAFRRAASVLKSLPHAISSSKDLEGLPCLGDQTKAVIEDILEYGQCSKVQDVLCDDRYQTIKLFTSVFGVGLKTAEKWYRKGFHSLEEVQADNAIHFTKMQKAGFLYYDDISAAVCKAEADAIGQIVEETVRLIAPDAIVTLTGGFRRGKNCGHDVDFLITTPEMGKEQLLPKVINLWEKKGLLLYYDLVESTFDKTRLPCRKFEAMDHFQKCFAIIKLKKELAAGRVQKDWKAIRVDFVMPPVDNFAFALLGWTGSRQFERDLRRFARHERKMLLDRHALYDKTKKIFLPAKTEEDIFAHLGLDYIPPWQRNA

SEQ ID NO: 524 - protein, 362 aa, Artificial Sequence
  Modified TdT Sequence
MENLYFQGTVSQYACQRRTTMENHNQIFTDAFAILAENAEFNESEGPALAFRRAASLLKSLPHAISSSKDLEGLPCLGDQTKAVIEDILEYGQCSKVQDVLCDDRYKTIKLFTSVFGVGLKTAEKWYRKGFHSLEEVQADKAIQFTKMQKAGFLYYDDISAAVCKAEADAIGQIVEETVRAIAPDAIVTLTGGFRRGKECGHDVDFLITTPEMGKEQLLPDVINLLEKKGLLLYYDLVESTFDKTRLPSRKFEAMDHFQKCFAIIKLKKELAAGRVQKDWKAIRVDFVMPPIDNFAFALLGWTGSRQFERDLRRFARHERKMLLDRHALYDKTKKIFLPAKTEEDIFAHLGLDYIPPWQRNA

SEQ ID NO: 525 - protein, 362 aa, Artificial Sequence
  Modified TdT Sequence
MENLYFQGTVSQYACQRRTTMENHNQIFTDAFAILAENAEFNESEGPALAFRRAASLLKSLPHTISSSKDLEGLPCLGDQTKAVIEDILEYGQCSKVQEVLCDDRYQTIKLFTSVFGVGLKTAEKWYRKGFHSLEEVQADKAIQFTKMQKAGFLYYDDISAAVCKAEADAIGQIVEETVRLIAPDAIVTLTGGFRRGKECGHDVDFLITTPEMGKEQLLPDVINLLEKKELLLYYDLVESTFDKTRLPCRKFEAMDHFQKCFAIIKLKKERAAGRVQKDWKAIRVDFVMPPIDNFAFALLGWTGSRQFERDLRRFARHERKMLLDRHALYDKTKKIFLPAKTEEDIFAHLGLDYIPPWQRNA

SEQ ID NO: 526 - protein, 362 aa, Artificial Sequence
  Modified TdT Sequence
MENLYFQGTVSQYACQRRTTMENHNQLFTDAFAILAENAEFNESEGPALAFRRAASLLKSLPHAILSSKDLEGLPCLGDQTKAVIEDILEYGQCSKVQDVLCDDRYQTIKLFTSVFGVGLKTAEKWYRKGFHSLEEVQADKAIQFTKMQKAGFLYYDDISAAVCKAEADAIGQIVEETVRLIAPDAIVTLTGGFRRGKECGHDVDFLITTAEMGKEQLLPDVINLLEKKGLLLYYDLVESTFDKTRLPCRKFEAMDHFQKCFAIIKLKKELAAGRVQKDWKAIRVDFVMPPIDNFAFTLLGWTGSRQFERDLRRFARHERKMLLDRHALYDKTKKIFLPAKTEEDIFAHLGLDYIPPWQRNA

SEQ ID NO: 527 - protein, 362 aa, Artificial Sequence
  Modified TdT Sequence
MENLYFQGTVSQYACQRRTTMENHNQIFTDAFAILAENAEFNESEGPAVAFRRAASLLKSLPHAISSSKDLEGLPCLGDQTKAVIEDILEYGQCSKVQDVLCDDRYQTIKLFTSVFGVGLKTAEKWYRMGFHSLEEVQADKAIQFTKMQKAGFLYYDDISAAVCKAEADAIGQIVEETVRLIAPDAIVTLTGGFRRGKECGHDVDFLITTPEMGKEQLLPKVINLLEQKGLLLYYDLVESTFDKTRLPCRKFEAMDHFQKCFAIIKLKKELAAGRVQKDWKAIRVDFVMPPVDNFAFALLGWTGSRQFERDLRRFARHERKMLLDRHALYDKTKKIFLPAKTEEDIFAHLGLDYIPPWQRNA

SEQ ID NO: 528 - protein, 362 aa, Artificial Sequence
  Modified TdT Sequence
MENLYFQGTVSQYACQRRTTMENHNQIFTDAFAILAENAEFNESEGPALAFRRAASLLKSLPHAISSSKDLEGLPCLGDQTKAVIEDILEYGQCSKVQDVLCDDRYKTIKLFTSVFGVGLKTAEKWYRKGFHSLEEVQADKAIQFTKMQKAGFLYYDDISAAVCKAEADAIGQIVEETVRKIAPDAIVTLTGGFRRGKECGHDVDFLITTPEQGKEQLLPDVINLLEKKGLLLYYHLVESTFDKTRLPCRKFEAMDHFQKCFAIIKLKKELAAGRVQKDWKAIRVDFVMPPIDNFAFALLGWTGSRQFERDLRRFARHERKMLLDRHALYDKTKKIFLPAKTEEDIFAHLGLDYIPPWQRNA

SEQ ID NO: 529 - protein, 362 aa, Artificial Sequence
  Modified TdT Sequence
MENLYFQGTVSQYACQRRTTMENHNQIFTDAFAILAENAEFNESEGPALAFRRAASLLKSLPHAISSSKDLEGLPCLGDQTKAVIEDILEYGQCSKVQDVLCDDRYQTIKLFTSVFGVGLKTAEKWYRKGFHSLEEVQADKAIQFTKMQKAGFLYYDDISAAVCKAEADAIGQIVEETVRLIAPDAIVTLTGGFRRGKECGHDVDFLITTPEAGKEQLLPKVINLLEQKGLLLYYDLVESTFDKTRLPCRKFEAMDHFQKCFAIIKLKKELAAGRVQKDWKAIRVDFVMPPIDNFAFALLGWTGSRQFERDLRRFARHERKMLLDRHALYDKTKKIFLPAKTEEDIFAHLGLDYIPPWQRNA

SEQ ID NO: 530 - protein, 362 aa, Artificial Sequence
  Modified TdT Sequence
MENLYFQGTVSQYACQRRTTMENHNQIFTDAFAILAENAEFNESESPCLAFRRAASLLKSLPHAISSSKDLEGLPCLGDQTKAVIEDILEYGQCSKVQDVLCDDRYQTIKLFTSVFGVGLKTAEKWYRKGFHSLEEVQADKAIHFTKMQRAGFLYYDDISAAVCKAEADAIGQVVEETVRLIAPDAIVTLTGGFRRGKEIGHDVDFLITTPEMGKEQLLPRVINLLEKKGLLLYYDLVESTFDKTRLPCRKFEAMDHFQKCFAIIKLKKELAAGRVQKDWKAIRVDFVMPPVDNFAFALLGWTGSRQFERDLRRFARHERKMLLDRHALYDKTKKIFLPAKTEEDIFAHLGLDYIPPWQRNA

SEQ ID NO: 531 - protein, 362 aa, Artificial Sequence
  Modified TdT Sequence
MENLYFQGTVSQYACQRRTTMENRNQIFTDAFAILAENAEFNESEGPALAFRRAASLLKSLPHAISSSKDLEGLPCLGDQTKAVIEEILEYGQCSKVQDVLCDDRYQTIKLFTSVFGVGLKTAEKWYRKGFHSLEEVQADKAIQFTKMQKAGFLYYDDISAAVCKAEADAIGQIVEETVRKIAPDAIVTLTGGFRRGKECGHDVDFLITTPEMGKEQLLPDVINLLEKKELLLYYDLVESTFDKTRLPCRKFEAMDHFQKCFAIIKLKKELAAGRVQKDWKAIRVDFVMPPIDNFAFALLGWTGSRQFERDLRRFARHERKMLLDRHALYDKTKKIFLPAKTEEDIFAHLGLDYIPPWQRNA

SEQ ID NO: 532 - protein, 362 aa, Artificial Sequence
  Modified TdT Sequence
MENLYFQGTVSQYACQRRTTMENHNQIFTDAFAILAENAEFNESEGPALAFRRAASLLKSLPHAISSSKDLEGLPCLGDQTKAVIEDILEYGQCSKVQDVLCDDRYQTIKLFTSVFGVGLKTAEKWYRKGFHSLEEVQADKAIQFTKMQKAGFLYYDDISAAVCKAEADAIGQIVEETVRLIAPDAIVTLTGGFRRGKECGHDVDFLITTPEMGKEQLLPKVINLLEKKGLLLYYDLVESTFDKTRLPCRKFEAMDHFQKCFAIIKLNKERAAGRVQKDWKAIRVDFVMPPIDNFAFALLGWTGSRQFERDLRRFARHERKMLLDRHALYDKTKKIFLPAKTEEDIFAHLGLEYIPPWQRNA

SEQ ID NO: 533 - protein, 362 aa, Artificial Sequence
  Modified TdT Sequence
MENLYFQGTVSQYACQRRTTMENHNQIFTDAFAILAENAEFNESEGPALAFRRAASLLKSLPHAISSSKDLEGLPCLGEQTKAVIEDILEYGQCSKVQDVLCDDRYQTIKLFTSVFGVGLKTAEKWYRKGFHSLEEVQADKAIQFTKMQKAGFLYYDDISAAVCKAEADAIGHIVEETVRLIAPDAIVTLTGGFRRGKECGHDVDFLITTPEMGKEQLLPDVINLLEKKGLLLYYDLVESTFDKTRLPCRKFEAMDHFQKCFAIIKLKKELAAGRVQKDWKAIRVDFVMPPIDNFAFALLGWTGSRQFERDLRRFARHERKMLLDRHALYDKTKRIFLPAKTEEDIFAHLGLDYIPPWQRNA

SEQ ID NO: 534 - protein, 362 aa, Artificial Sequence
  Modified TdT Sequence
MENLYFQGTVSQYACQRRTTMENHNQIFTDAFAILAENAEFNESEGPCLAFRRAASLLKSLPHAISSSKDLEGLPCLGDQTKAVIEDILEYGQCSKVQDVLCDDRYQTIKLFTSVFGVGLKTAEKWYRKGFHSFEEVQADKAIHFTKMQKAGFLYYDDISAAVCRAEADAIGQIVEETVRLIAPDAILTLTGGFRRGKECGHDVDFLITTPEMGKEQLLPKVINLWEKKGLLLYYDLVESTFDKTRLPCRKFEAMDHFQKCFAIIKLKKELAAGRVQKDWKAIRVDFVMPPVDNFAFALLGWTGSRQFERDLRRFARHERKMLLDRHALYDKTKKIFLPAKTEEDIFAHLGLDYIPPWQRNA

SEQ ID NO: 535 - protein, 362 aa, Artificial Sequence
  Modified TdT Sequence
MENLYFQGTVSQYACQRRTTMENHNQIFTDAFAILAENAEFNESEGPALAFRRAASLLKSLPHAISSSKDLEGLPCLGDQTKAVIEDILEYGQCSKVQDVLCDDRYKTIKLFTSVFGVGLKTAEKWYRKGFHSLEEVQADKAIQFTKMQKAGFLYYDDISAAVCKAEADAIGQIVEETVHLMAPDALVTLTGGFRRGKECGHDVDFLITTPEMGKEQLLPDVINLLEKKGLLLYYDLVESTFDKTRLPCRKFEAMDHFQKCFAIIKLKKELAAGRVQKDWKAIRVDFVMPPIDNFAFALLGWTGSRQFERDLRRFARHERKMLLDRHALYDKTKKIFLPAKTEEDIFAHLGLDYIPPWQRNA

SEQ ID NO: 536 - protein, 362 aa, Artificial Sequence
  Modified TdT Sequence
MENLYFQGTVSQYACQRRTTMENHNQIFTDAFAILAENAEFNESEGPCVAFRRAASLLKSLPHAISSSKDLQGLPCLGDQTKAVIEDILEYGQCSKVQDVLCDDRYQTIKLFTSVFGVGLKTAEKWYRKGFHSLEEVQADKAIHFTKMQKAGFLYYDDISAAVCKAEADAIGQIVEETVRLIAPDAIVTLTGGFRRGKECGHDVDFLITTPEMGKEQLLPKVINLWEKKGLLLYYDLVESTFDKTRLPCRKFEAMDHFQKCFAIIKLKKELAAGRVQKDWKAIRVDFVMPPVDNFAFALLGWTGSRQFERDLRRFARHERRMLLDRHALYDKTKKIFLPAKTEEDIFAHLGLDYIPPWQRNA

SEQ ID NO: 537 - protein, 362 aa, Artificial Sequence
  Modified TdT Sequence
MENLYFQGTVSQYACQRRTTMENHNQIFTDAFAILAENAEFNESEGPALAFRRAASLLKSLPHAISSSKDLEGLPCLGDQTKAVIEDILEYGQCSKVQDVLCDDRYQTIKLFTSVFGVGLKTAEKWYRKGFHSLEEVQADKAIHFTKMQKAGFLYYDDISAAVCKAEADAIGQIVEETVRLIAPDAIVTLTGGFRRGKEIGHDVDFLITTPEMGKEQLLPRVINLLEKKGLLLFYDLVESTFDKTRLPCRKFEAMDHFQKCFAIIKLKKELAAGRVQKDWKAIRVDFVMPPVDCFAFALLGWTGSRQFERDLRRFARHERKMLLDRHALYDKTKKIFLPAKTEEDIFAHLGLDYIPPWQRNA

SEQ ID NO: 538 - protein, 362 aa, Artificial Sequence
  Modified TdT Sequence
MENLYFQGTVSQYACQRRTTMENHNQIFTDAFAILAENAEFNESEGPALAFRRAASLLKSLPHAISSSKDLEGLPCLGDQTKAVIEDILEYGQCSKVQDVLCDDRYQTIKLFTSVFGVGLKTAEKWYRKGFHSLEDVQADKAIHFTKMQKAGFLYYDDISAAVCKAEADAIGQIVEETVRLIAPDAIVTLTGGFRRGKECGHDVDFLITTPEMGKEQLLPKVVNLWEKKGLLLYYDLVESTFDKTRLPCRKFEAMDHFQKCFAIIKLKKELAAGRVQKDWKAIRVDFVMPPVDNFAFALLGWTGSRQFERDLRRFARHERKMLLDRHALYDKTKKIFLPAKTEEDIFAHLGLDYIPPWQRNA

SEQ ID NO: 539 - protein, 362 aa, Artificial Sequence
  Modified TdT Sequence
MENLYFQGTVSQYACQRRTTMENHNQIFTDAFAILAENAEFNESEGPCLAFRRAASLLKSLPHAISSSKDLEGLPCLGDQTKAVIEDIFEYGQCSKVQDVLCDDRYKTIKLFTSVFGVGLKTAEKWYRMGFHSLEEVQADKAIHFTKMQKAGFLYYDDISAAVCKAEADAIGQIVEETVRLIAPDAIVTLTGGFRRGKEIGHDVDFLITTPEMGKEQLLPRVINLLEKKGLLLYYDLVESTFDKTRLPCRKFEAMDHFQKCFAIIKLKKELADGRVQKDWKAIRVDFVMPPVDNFAFALLGWTGSRQFERDLRRFARHERKMLLDRHALYDKTKKIFLPAKTEEDIFAHLGLDYIPPWQRNA

SEQ ID NO: 540 - protein, 362 aa, Artificial Sequence
  Modified TdT Sequence
MENLYFQGTVSQYACQRRTTMENHNQIFTDAFAILAENAEFNESEGPCVAFRRAASLLKSLPHAISSSKDLEGLPCLGDQTKAVIEDILEYGQCSKVQDVLCDDRYQTIKLFTSVFGVGLKTAEKWYRKGFHSLEEVQADKAIHFTKMQKAGFLYYDDISAAVCKAEADAIGQIVEETVRLIAPDAIVTLTGGFRRGKEIGHDVDFLITTPEMGKEQLLPRVINLLEKKGLLLYYDLVESTFDKTRLPCRKFEAMDHFQQCFAIIKLKKELAAGRVQKDWKAIRVDFVMPPIDNFAFALLGWTGSRQFERDLRRFARHERKMLLDRHALYDKTKKIFLPAKTEEDIFAHLGLDYIPPWQRNA

SEQ ID NO: 541 - protein, 362 aa, Artificial Sequence
  Modified TdT Sequence
MENLYFQGTVSQYACQRRTTMENHNQIFTDAFAILAENAEFNENEGPCLAFLRAASLLKSLPHAISSSKDLEGLPCLGDQTKAVIEDILEYGQCSKVQDVLCDDRYQTIKLFTSVFGVGLKTAEKWYRKGFHSLEEVQADKAIHFTKMQKAGFLYYDDISAAVCKAEADAIGQIVEETVRLIAPDAIVTLTGGFRRGKEIGHDVDFLITTPEMGREQLLPRVIDLLEKKGLLLYYDLVESTFDKTRLPCRKFEAMDHFQKCFAIIKLKKELAAGRVQKDWKAIRVDFVMPPVDNFAFALLGWTGSRQFERDLRRFARHERKMLLDRHALYDKTKKIFLPAKTEEDIFAHLGLDYIPPWQRNA

SEQ ID NO: 542 - protein, 362 aa, Artificial Sequence
  Modified TdT Sequence
MENLYFQGTVSQYACQRRTTMENNNQIFTDAFAILAENAEFNESEGPCLAFRRAASLLKSLPHAISSSKDLEGLPCLGDQTKAVIEDILEYGQCSKVQDVLCDDRYQTIKLFTSVFGVGLKTAEKWYRKGFHSLEEVQADKAIHFTKMQKAGFLYYDDISAAVCKAEADAIGQIVEETVRLIAPDAIVTLTGGFRRGKEIGHDVDFLITTPEMGKEQLLPRVINLLEKKGLLLYYDLVESTFDKTRLPCRKFEAMDHFQKCFAIIKLKQELAAGRVQKDWKAIRVDFVMPPVDNFAFALLGWTGSRQFERDLRRFARHERKMLLDRHALYDKTKRIFLPAKTEEDIFAHLGLDYIPPWQRNA

SEQ ID NO: 543 - protein, 362 aa, Artificial Sequence
  Modified TdT Sequence
MENLYFQGTVSQYACQRRTTMENHNQIFTDAFAILAENAEFNESEGPALAFRRAASLLKSLPHAISSSKDLEGLPCLGDQTKAVIEEILEYGQCSKVQDVLCDDRYQTIKLFTSVFGVGLKTAEKWYRKGFHSLEEVQADKAIQFTKMQKAGFLYYDDISAAVCKAEADAIGQIVEETVRLIAPDAIVTLTGGFRRGKEIGHDVDFLITTPEMGKEQLLPKVINLLEKKGLLLYYHLVESTFDKTRLPCRKFEAMDHFQKCFAIIKLKKELAAGRVQKDWKAIRVDFVMPPVDNFAFALLGWTGSRQFERDLRRFARHERKMLLDRHALYDKTKKIFLPAKTEEDIFAHLGLEYIPPWQRNA

SEQ ID NO: 544 - protein, 362 aa, Artificial Sequence
  Modified TdT Sequence
MENLYFQGTVSQYACQRRTTMENHNQIFTDAFAILAENAEFNESEGPALAFRRAASLLKSLPHAISSSKDLEGLPCLGDQTKAVIEEILEYGQCSKVQDVLCDDRYQTIKLFTSVFGVGLKTAEKWYRKGFHSLEEVQADKSIQFTKMQKAGFLYYDDISAAVCKAEADAIGQIVEETVRLIAPDAIVTLTGGFRRAKECGHDVDFLITTPEMGKEQLLPDVINLLEKKGLLLYYDLVESTFDKTRLPCRKFEAMDHFQKCFAIIKLKKELAAGRVQKDWKAIRVDFVMPPIDNFAFALLGWTGSRQFERDLRRFARHERKMLLDRHALYDKTKKIFLPAKTEEDIFAHLGLDYIPPWQRNA

SEQ ID NO: 545 - protein, 362 aa, Artificial Sequence
  Modified TdT Sequence
MENLYFQGTVSQYACQRRTTMENHNQIFTDAFAILAENAEFNESEGPCLAFRRAASLLKSLPHAISSSKDLEGLPCLGDQTKAVIEDILEYGQCSKVQDVLCDDRYQTIKLFTSVFGVGLKTAEKWYRKGFHSLEEVQADKAIHFTKMQRAGFLYYDDISAAVCKAEADAIGQIVEETVRLIAPDAIVTLTGGFRRGKECGHDVDFLITTPEMGKEQLLPRVINLLEQKGLLLYYDLVESTFDKTRLPCRKFEAMDHFQKCFAIIKLKKELAAGRVQKDWKAIRVDFVMPPVDNFAFALLGWTGSRQFERDLRRFARHERKMLLDRHALYDKTKKIFLPAKTEEDIFAHLGLDYIPPWQRNA

SEQ ID NO: 546 - protein, 362 aa, Artificial Sequence
  Modified TdT Sequence
MENLYFQGTVSQYACQRRTTMENHNQIFTDAFAILAENAEFNESEGPALAFRRAASLLKSLPHAISSSKDLEGLPCLGDQTKAVIEDILEYGQCSKVQDVLCDDRYQTIKLFTSVFGVGLKTAEKWYRMGFHSLEEVQADKAIQFTKMQKAGFLYYDDISAAVCKAEADAIGQIVEETVRLIAPDAIVTLTGGFRRGKEIGHDVDFLITTPEMGKEQLLPKVINLLEKKGLLLYYDLVESTFDITRLPCRKFEAMDHFQKCFAIIKLKKELAAGRVQKDWKAIRVDFVMPPVDNFAFALLGWTGSRQFERDLRRFARHERKMLLDRHALYDKTKKIFLPAKTEEEIFAHLGLDYIPPWQRNA

SEQ ID NO: 547 - protein, 362 aa, Artificial Sequence
  Modified TdT Sequence
MENLYFQGTVSQYACQRRTTMENHNQIFTDAFAILAENAEFNESEGPCLAFRRAASLLKSLPHAISSSKDLEGLPCLGDQTKAVIEDILEYGQCSKVQDVLCDDRYQTIKLFTSVFGVGLKTAEKWYRMGFHSLEEVQADKAIHFTKMQKAGFLYYDDISAAVCKAEADAIGQIVEETVRGIAPDAIVTLTGGFRRGKEIGHDVDFLITTPEAGKEQLLPRVINLLEKKGLLLYYDLVESTFDKTRLPCRKFEAMDHFQKCFAIIKLKKELAAGRVQKDWKAIRVDFVMPPVDNFAFALLGWTGSRQFERDLRRFARHERKMLLDRHALYDKTKKIFLPAKTEEDIFAHLGLDYIPPWQRNA

SEQ ID NO: 548 - protein, 362 aa, Artificial Sequence
  Modified TdT Sequence
MENLYFQGTVSQYACQRRTTMENHNQIFTDAFAILAENAEFNESEGPCLAFRRAASLLKSLPHAISSSKDLEDLPCLGDQTKAVIEDILEYGQCSKVQDVLCDDRYQTIKLFTSVFGVGLKTAEKWYRKGFHSLEEVQADKAIHFTKMQKAGFLYYDDISAAVCKAEADAIGQIVEETVRLIAPDAIVTLTGGFRRGKEIGHDVDFLITTPEMGKEQLLPRVINLLEKKGLLLYYDLVESTFDKTRLPCRKFEAMDHFQKCFAIIKLKQELAAGRVQKDWKAIRVDFVMPPVDCFAFALLGWTGSRQFERDLRRFARHERKMLLDRHALYDKTKKIFLPAKTEEDIFAHLGLDYIPPWQRNA

SEQ ID NO: 549 - protein, 362 aa, Artificial Sequence
  Modified TdT Sequence
MENLYFQGTVSQYACQRRTTMENHNQIFTDAFAILAENAEFNESEGPCLAFRRAASLLKSLPHAISSSKDLEGLPCLGDQTKAVIEDILEYGQCSKVQDVLCDDRYQTIKLFTSVFGVGLKTAEKWYRKGFHSLEEVQADKAIHFTKMQKAGFLYYDDISAAVCKAEADAIGQIVEETVRLITPDAIVTLTGGFRRGKECGHDVDFLITTPEMGKEQLLPKVVNLWEKKGLLLYYDLVESTFDKTRLPCRKFEAMDHFQKCFAIIKLKKELAAGRVQKDWKAIRVDFVMPPVDNFAFALLGWTGSRQFERDLRRFARHERKMLLDRHALYDKRKKIFLPAKTEEDIFAHLGLDYIPPWQRNA

SEQ ID NO: 550 - protein, 362 aa, Artificial Sequence
  Modified TdT Sequence
MENLYFQGTVSQYACQRRTTMENHNQIFTDAFAILAENAEFNESEGPALAFRRAASLLKSLPHAISSSKDLEGLPCLGDQTKGVIEEILEYGQCSKVQDVLCDDRYQTIKLFTSVFGVGLKTAEKWYRKGFHSLEEVQADKAIQFTKMQKAGFLYYDDISAAVCKAEADAIGQIVEETVRLIAPDAIVTLTGGFRRGKECGHDVDFLITTPEMGKEQLLPDVINLLEKKGLLLYYDLVESTFDKTRLPCRKFEAMDHFQKCFAIIKLKKELAAGCVQKDWKAIRVDFVMPPIDNFAFALLGWTGSRQFERDLRRFARHERKMLLDRHALYDKTKKIFLPAKTEEDIFAHLGLDYIPPWQRNA

SEQ ID NO: 551 - protein, 362 aa, Artificial Sequence
  Modified TdT Sequence
MENLYFQGTVSQYACQRRTTMENHNQIFTDAFAILAENAEFNESEGPCLAFRRAASLLKSLPHAISSSKDLEGLPCLGDQTKAVIEDILEYGQCSKVQDVLCDDRYQTIKLFTSVFGVGLKTAEKWYRKGFHSLEEVQADKAIHFTKMQKAGFLYYDDISAAVCKAEADAIGQIVEETVRLIAPDAIVTLTGGFRRGKECGHDVDFLITTPEMGKEQLLPRVINLLEKKGLLLFYDLVESTFDKTRLPCRKFEAMDHFQKCFAIIKLKKELAAGRVQKDWKAIRVDFVMPPVDNFAFALLGWTGSRQFERDLRRFARHERKMLLDRHALYDKTKKIFLPAKSEEDIFAHLGLDYIPPWQRNA

SEQ ID NO: 552 - protein, 362 aa, Artificial Sequence
  Modified TdT Sequence
MENLYFQGTVSQYACQRRTTMENHNQIFTDAFAILAENAEFNESEGPCLAFRRAASLLKSLPHAISSSKDLEGLPCLGDQTKAVIEDILEYGQCSKVQDVLCDDRYQTIKLFTSVFGVGLKTAEKWYRMGFHSLEEVQADKAIHFTKMQKAGFLYYDDISAAVCKAEADAIGQIVEETVRLIAPDAIVTLTGGFRRGKECGHDVDFLITTPEAGKEQLLPKVINLWEKKGLLLYYDLVESTFDKLRLPCRKFEAMDHFQKCFAIIKLKKELAAGRVQKDWKAIRVDFVMPPVDNFAFALLGWTGSRQFERDLRRFARHERKMLLDRHALYDKTKKIFLPAKTEEDIFAHLGLDYIPPWQRNA

SEQ ID NO: 553 - protein, 362 aa, Artificial Sequence
  Modified TdT Sequence
MENLYFQGTVSQYACQRRTTMENHNQVFTDAFAILAENAEFNESEGPALAFRRAASLLKSLPHAISSSKDLEGLPCLGDQTKAVIEDILEYGQCSKVQDVLCDDRYQTIKLFTSVFGVGLKTAEKWYRKGFHSLEEVQADKAIQFTKMQRAGFLYYDDISAAVCKAEADAIGQIVEETVRLIAPDAIVTLTGGFRRGKEIGHDVDFLITTPEAGKEQLLPKVINLLEKKGLLLYYDLVESTFDKTRLPCRKFEAMDHFQKCFAIIKLKKELAAGRVQKDWKAIRVDFVMPPADNFAFALLGWTGSRQFERDLRRFARHERKMLLDRHALYDKTKKIFLPAKTEEDIFAHLGLDYIPPWQRNA

SEQ ID NO: 554 - protein, 362 aa, Artificial Sequence
  Modified TdT Sequence
MENLYFQGTVSQYACQRRTTMENHNQIFTDAFAILAENAEFNESEGPCLAFRRAASLLKSLPHAISSSKDLQGLPCLGDQTKAVIEDILEYGQCSKVQDVLCDDRYQTIKLFTSVFGVGLKTAEKWYRKGFHSFEEVQADKAIHFTKMQRAGFLYYDDISAAVCKAEADAIGQIVEETVRLIAPDAIVTLTGGFRRGKECGHDVDFLITTPEMGKEQLLPKVINLWEKKGLLLYYDLVESTFDKTRLPCRKFEAMDHFQKCFAIIKLKKELAAGRVQKDWKAIRVDFVMPPVDNFAFALLGWTGSRQFERDLRRFARHERKMLLDRHALYDKTKKIFLPAKTEEDIFAHLGLDYIPPWQRNA

SEQ ID NO: 555 - protein, 362 aa, Artificial Sequence
  Modified TdT Sequence
MENLYFQGTVSQYACQRRTTMENHNQIFTDAFAILAENAEFNESEGPCLAFRRAASLLKSLPHAISSSKDLEGLPCLGDQTKAVIEDILEYGQCSKVQDVLCDDRYQTIKLFTSVFGVGLKTAEKWYRKGFHSLEEVQADKAIQFTKMQKAGFLYYDDISAAVCKAEADAIGQIVEETVRLIAPDAIVTLTGGFRRGKECGHDVDFLITTPEMGKEQLLPDVINLLEKKGLLLYYDLVESTFDKTRLPCRKFEAMDHFQKCFAIIKLKKERAAGRVQKDWKAIRVDFVMPPIDNFAFALLGWTGSRQFERDLRRFARHERKMLLDRHALYDKTKRIFLPAKTEEDIFAHLGLDYIPPWQRNA

SEQ ID NO: 556 - protein, 362 aa, Artificial Sequence
  Modified TdT Sequence
MENLYFQGTVSQYACQRRTTMENNNQIFTDAFAILAENAEFNESEGPCLAFLRAASLLKSLPHAISSSKDLEGLPCLGDQTKAVIEDILEYGQCSKVQDVLCDDRYQTIKLFTSVFGVGLKTAEKWYRKGFHSLEEVQADKAIHFTKMQKAGFLYYDDISAAVCKAEADAIGQIVEETVRLIAPDAIVTLTGGFRRGKECGHDVDFLITTPEMGKEQLLPRLINLLEKKGLLLYYDLVESTFDKTRLPCRKFEAMDHFQKCFAIIKLKKELAAGRVQKDWKAIRVDFVMPPVDNFAFALLGWTGSRQFERDLRRFARHERKMLLDRHALYDKTKKIFLPAKTEEDIFAHLGLDYIPPWQRNA

SEQ ID NO: 557 - protein, 362 aa, Artificial Sequence
  Modified TdT Sequence
MENLYFQGTVSQYACQRRTTMENHNQIFTDAFAILAENAEFNENEGPALAFRRAASLLKSLPHAISSSKDLEGLPCLGDQTKAVIEDILEYGQCSKVQDVLCDDRYQTIKLFTSVFGVGLKTAEKWYRKGFHSLEEVQADKAIQFTKMQKAGFLYYDDISAAVCKAEADAIGQIVEETVRLIAPDAIVTLTGGFRRGKEIGHDVDFLITTPEAGREQLLPKVINLLEKKGLLLYYDLVESTFDKTRLPCRKFEAMDHFQKCFAIIKLKKELAAGRVQKDWKAIRVDFVMPPVDNFAFALLGWTGSRQFERDLRRFARHERKMLLDRHALYDKTKKIFLPAKTEEDIFAHLGLDYIPPWQRNA

SEQ ID NO: 558 - protein, 362 aa, Artificial Sequence
  Modified TdT Sequence
MENLYFQGTVSQYACQRRTTMENHNQIFTDAFAILAENAEFNESEGPCLAFRRAASLLKSLPHAISSSKDLEGLPCLGDQTKAVIEDILECGQCSKVQDVLCDDRYQTIKLFTSVFGVGLKTAEKWYRKGFHSLEEVQADKAIHFTKMQKAGFLYYDDISAAVCKAEADAIGQIVEETVRGIAPDAIVTLTGGFRRGKECGHDVDFLITTPEMGKEQLLPKVINLLEKKGLLLYYDLVESTFDKTRLPCRKFEAMDHFQKCFAIIKLKKELAAGRVQKDWKAIRVDFVMPPVDNFAFALLGWTGSRQFERDLRRFARHERKMLLDRHALYDKTKKIFLPAKTEEDIFAHLGLDYIPPWQRNA

SEQ ID NO: 559 - protein, 362 aa, Artificial Sequence
  Modified TdT Sequence
MENLYFQGTVSQYACQRRTTMENHNQIFTDAFAILAENAEFNESEGPALAFLRAASLLKSLPHAISSSKDLEGLPCLGDQTKAVIEDILEYGQCSKVQDVLCDDRYQTIKLFTSVFGVGLKTAEKWYRMGFHSLEEVQADKAIQFTKMQKAGFLYYDDISAAVCKAEADAIGQIVEETVRLIAPDAIVTLTGGFRRGKEIGHDVDFLITTPEMGKEQLLPKVINLLEKKGLLLYYDLVESTFDKTRLPCRKFEAMDHFQKCFAIIKLKKEQAAGRVQKDWKAIRVDFVMPPVDNFAFALLGWTGSRQFERDLRRFARHERKMLLDRHALYDKTKRIFLPAKTEEDIFAHLGLDYIPPWQRNA

SEQ ID NO: 560 - protein, 362 aa, Artificial Sequence
  Modified TdT Sequence
MENLYFQGTVSQYACQRRTTMENHNQIFTDAFAILAENAEFNESEVPALAFRRAASLLKSLPHAISSSKDLEGLPCLGDQTKAVIEDILEYGQCSKVQDVLCDDRYQTIKLFTSVFGVGLKTAEKWYRKGFHSLEEVQADKAIQFTKMQRAGFLYYDDISAAVCKAEADAIGQIVEETVRLIAPDAIVTLTGGFRRGKEIGHDVDFLITTPEMGKEQLLPKVINLLEQKGLLLYYDLVESTFDKTRLPCRKFEAMDHFQKCFAILKLKKELAAGRVQKDWKAIRVDFVMPPVDNFAFALLGWTGSRQFERDLRRFARHERKMLLDRHALYDKTKKIFLPAKTEEDIFAHLGLDYIPPWQRNA

SEQ ID NO: 561 - protein, 362 aa, Artificial Sequence
  Modified TdT Sequence
MENLYFQGTVSQYACQRRTTMENHNQIFTDAFAILAENAEFNESEGPALAFRRAASLLKSLPHAISSSKDLEGLPCLGDQTKAVIEDILEYGQCSKVQDVLCDDRYKTIKLFTSVFGVGLKTAEKWYRKGFHSLEEVQADKAIQFTKMQKAGFLYYDDISAAVCKAEADAIGQIVEETVRKIAPDAIVTLTGGFRRGKECGHDVDFLITTPEMGKEQLLPDVINLLEKKGLLLYYDLVESTFDKTRLPCRKFEAMDHFQKCFAIIKLKKERAAGRVQKDWKAIRVDFVMPPIDNFAFALLGWTGSRQFERDLRRFARHERKMLLDRHALYDKTKKIFLPAKTEEDIFAHLGLDYIPPWQRNA

SEQ ID NO: 562 - protein, 362 aa, Artificial Sequence
  Modified TdT Sequence
MENLYFQGTVSQYACQRRTTMENHNQIFTDAFAILAENAEFNESEGPCLAFRRAASLLKSLPHAISSLKDLEGLPCLGDQTKAVIEDILEYGQCSKVQDVLCDDRYQTIKLFTSVFGVGLKTAEKWYRKGFHSLEEVQADKAIQFTKMQKAGFLYYDDISAAVCKAEADAIGQIVEETVRLIAPDAIVTLTGGFRRGKECGHDVDFLITTPEMGKEQLLPDVINLLEKKGLLLYYDLVESTFDKTRLPCRKFEAMDHFQKCFAIIKLKKELAAGRVQKDWKAIRVDFVMPPIDNFAFTLLGWTGSRQFERDLRRFARHERKMLLDRHALYDKTKKIFLPAKTEEDIFAHLGLDYIPPWQRNA

SEQ ID NO: 563 - protein, 362 aa, Artificial Sequence
  Modified TdT Sequence
MENLYFQGTVSQYACQRRTTMENHNQIFTDAFAILAENAEFNESEGPALAFRRAASLLKSLPHAISSSKDLEGLPCLGDQTKAVIEDILEYGQCSKVQDVLCDDRYQTIKLFTSVFGVGLKTAEKWYRKGFHSLEEVQADKAIHFTKMQKAGFLYYDDISAAVCKAEADAIGQIVEETVRLIAPDAIVTLTGGFRRGKEIGHDVDFLITTPEMGKEQLLPRVINLLEKKGLLLYYDLVESTFDKTRLPCRKFEAMDHFQKCFAIIKLKKELAAGRVQKDWKAIRVDFVMPPIDNFAFALLGWTGSRQFERDLRRFARHERKMLLDRHALYDRTKKIFLPAKTEEDIFAHLGLDYIPPWQRNA

SEQ ID NO: 564 - protein, 362 aa, Artificial Sequence
  Modified TdT Sequence
MENLYFQGTVSQYACQRRTTMENHNQIFTDAFAILAENAEFNESEGPALAFRRAASLLKSLPHAISSSKDLEGLPCLGDQTKAVIEDILEYGQCSKVQDVLCDDRYQTIKLFTSVFGVGLKTAEKWYRKGFHSLEEVQADKAIQFTKMQKAGFLYYDDISAAVCKAEADAIGQIVEETVRLMAPDAIVTLTGGFRRGKECGHDVDFLITTPEQGKEQLLPDLINLLEKKGLLLYYDLVESTFDKTRLPCRKFEAMDHFQKCFAIIKLKKELAAGRVQKDWKAIRVDFVMPPIDNFAFALLGWTGSRQFERDLRRFARHERKMLLDRHALYDKTKKIFLPAKTEEDIFAHLGLEYIPPWQRNA

SEQ ID NO: 565 - protein, 362 aa, Artificial Sequence
  Modified TdT Sequence
MENLYFQGTVSQYACQRRTTMENHNQIFTDAFAILAENAEFNESEGPALAFRRAASLLKSLPHAISSSKDLEGLPCLGDQTKAVIEDILEYGQCSKVQDVLCDDRYQTIKLFTSVFGVGLKTAEKWYRKGFHSLEEVQADKAIQFTKMQKAGFLYYDDISAAVCKAEADAIGQIVEETVRLIAPDAIVTLTGGFRRGKSCGHDVDFIITTPEMGKEQLLPDVINLLEKKGLLLYYDLIESTFDKTRLPCRKFEAMDHFQKCFAIIKLKKELAAGRVQKDWKAIRVDFVMPPIDNFAFALLGWTGSRQFERDLRRFARHERKMLLDRHALYDKTKKIFLPAKTEEDIFAHLGLDYIPPWQRNA

SEQ ID NO: 566 - protein, 362 aa, Artificial Sequence
  Modified TdT Sequence
MENLYFQGTVSQYACQRRTTMENHNQIFTDAFAILAENAEFNESEGPCLAFRRAASLLKSLPHAISSSKDLEDLPCLGDQTKAVIEDILEYGQCSKVQDVLCDDRYQTIKLFTSVFGVGLKTAEKWYRKGFHSLEEVQADKAIHFTKMQKAGFLYYDDISAAVCKAEADAIGQIVEETVRGIAPDAIVTLTGGFRRGKEIGHDVDFLITTPEMGKEQLLPRVINLLEQKGLLLYYDLVESTFDKTRLPCRKFEAMDHFQKCFAIIKLKKELAAGRVQKDWKAIRVDFVLPPVDNFAFALLGWTGSRQFERDLRRFARHERKMLLDRHALYDKTKKIFLPAKTEEDIFAHLGLDYIPPWQRNA

SEQ ID NO: 567 - protein, 362 aa, Artificial Sequence
  Modified TdT Sequence
MENLYFQGTVSQYACQRRTTMENHNQIFTDAFAILAENAEFNESEGPALAFRRAASLLKSLPHAISSSKDLEGLPCLGEQTKAVIEDILEYGQCSKVQDVLCDDRYQTIKLFTSVFGVGLKTAEKWYRKGFHSLEEVQADKAIQFTKMQKAGFLYYDDISAAVCKAEADAIGQIVEETVRLIAPDAIVTLTGGFRRGKECGHDVDFLITTPEMGKEQLLPDVMNLLEKKGLLLYYDLVESTFDKTRLPCRKFEAMDHFQKCFAIIKLKKELAAGRVQKDWKAIRVDFVMPPADNFAFALLGWTGSRQFERDLRRFARHERKMLLDRHALYDKTKKIFLPAKTEEDIFAHLGLDYIPPWQRNA

SEQ ID NO: 568 - protein, 362 aa, Artificial Sequence
  Modified TdT Sequence
MENLYFQGTVSQYACQRRTTMENHNQIFTDAFAILAENAEFNESEGPALAFRRAASLLKSLPHAISSSKDLEGLPCLGDQTKAVIEDILEYGQCSKVQDVLCDDRYQTIKLFTSVFGVGLKTAEKWYRMGFHSLEEVQADKAIQFTKMQKAGFLYYDDISAAVCKAEADAIGQIVEETVRLIAPDAIVTLTGGFRRGKEIGHDVDFLITTPEMGKEQLLPKVIDLLEKKGLLLYYELVESTFDKTRLPCRKFEAMDHFQKCFAIIKLKKELAAGRVQKDWKAIRVDFVMPPVDNFAFALLGWTGSRQFERDLRRFARHERKMLLDRHALYDKTKKIFLPAKTEEDIFAHLGLDYIPPWQRNA

SEQ ID NO: 569 - protein, 362 aa, Artificial Sequence
  Modified TdT Sequence
MENLYFQGTVSQYACQRRTTMENHNQIFTDAFAILAENAEFNESEGPCLAFRRAASLLKSLPHAISSSKDLEGLPCLGDQTKAVIEDILEYGQCSKVQDVLCDDRYQTIKLFTSVFGVGLKTAEKWYRKGFHSFEEVQADKAIHFTKMQKAGFLYYDDISAAVCKAEADAIGQIVEETVRLIAPDAIVTLTGGFRRGKECGHDVDFLITTPEMGKEQLLPKVIDLWEKKGLLLYYDLVESTFDKTRLPCRKFEAMDHFQKCFAIIKLKKELAAGRVQKDWKAIRVDFVMPPVDNFAFALLGWTGSRQFERDLRRFARHERKMLLDRHALYDKRKKIFLPAKTEEDIFAHLGLDYIPPWQRNA

SEQ ID NO: 570 - protein, 362 aa, Artificial Sequence
  Modified TdT Sequence
MENLYFQGTVSQYACQRRTTMENHNQIFTDAFAILAENAEFNESEGPALAFRRAASLLKSLPHAISSSKDLEGLPCLGDQTKAVIEDILEYGQCSKVQDVLCDDRYQTIKLFTSVFGVGLKTAEKWYRKGFHTLEEVQADKAIQFTKMQKAGFLYYDDISAAVCKAEADAIGQIVEETVHLIAPDAIVTLTGGFRRGKEIGHDVDFLITTPEQGKEQLLPKVINLLEKKGLLLYYDLVESTFDKTRLPCRKFEAMDHFQKCFAIIKLKKELAAGRVQKDWKAIRVDFVMPPVDNFAFALLGWTGSRQFERDLRRFARHERKMLLDRHALYDKTKKIFLPAKTEEDIFAHLGLDYIPPWQRNA

SEQ ID NO: 571 - protein, 362 aa, Artificial Sequence; identical to SEQ ID NO: 449
  Modified TdT Sequence

SEQ ID NO: 572 - protein, 362 aa, Artificial Sequence
  Modified TdT Sequence
MENLYFQGTVSQYACQRRTTMENHNQIFTDAFAILAENAEFNENEGPALAFRRAASLLKSLPHAISSLKDLEGLPCLGDQTKAVIEDILEYGQCSKVQDVLCDDRYQTIKLFTSVFGVGLKTAEKWYRKGFHSLEEVQADKAIQFTKMQKAGFLYYDDISAAVCKAEADAIGQIVEETVRLIAPDAIVTLTGGFRRGKEIGHDVDFLITTPEMGKEQLLPKVINLLEKKGLLLYYDLVESTFDITRLPCRKFEAMDHFQKCFAIIKLKKELAAGRVQKDWKAIRVDFVMPPVDNFAFALLGWTGSRQFERDLRRFARHERKMLLDRHALYDKTKKIFLPAKTEEDIFAHLGLDYIPPWQRNA

SEQ ID NO: 573 - protein, 362 aa, Artificial Sequence
  Modified TdT Sequence
MENLYFQGTVSQYACQRRTTMENHNQIFTDAFAILAENAEFNESEGPALAFRRAASLLKSLPHAISSSKDLEGLPCLGDQTKAVIEDILEYGQCSKVQDVLCDDRYQTIKLFTSVFGVGLKTAEKWYRKGFHSLEEVQADKAIQFTKMQKAGFLYYDDISAAVCKAEADAIGHIVEETVRLIAPDAIVTLTGGFRRGKECGHDVDFLITTPEQGKEQLLPDVINLLEKKGLLLYYDLIESTFDKTRLPCRKFEAMDHFQKCFAIIKLKKELAAGRVQKDWKAIRVDFVMPPIDNFAFALLGWTGSRQFERDLRRFARHERKMLLDRHALYDKTKKIFLPAKTEEDIFAHLGLDYIPPWQRNA

SEQ ID NO: 574 - protein, 362 aa, Artificial Sequence
  Modified TdT Sequence
MENLYFQGTVSQYACQRRTTMENHNQIFTDAFAILAENAEFNESEGPCVAFRRAASLLKSLPHAISSSKDLEGLPCLGDQTKAVIEDILEYGQCSKVQDVLCDDRYQTIKLFTSVFGVGLKTAEKWYRKGFHSLEEVQADKAIHFSKMQKAGFLYYDDISAAVCKAEADAIGQIVEETVRLIAPDAIVTLTGGFRRGKECGHDVDFLITTPEMGREQLLPKVINLWEKKGLLLYYDLVESTFDKTRLPCRKFEAMDHFQKCFAIIKLKKELAAGRVQKDWKAIRVDFVMPPVDNFAFALLGWTGSRQFERDLRRFARHERKMLLDRHALYDKTKKIFLPAKTEEDIFAHLGLDYIPPWQRNA

SEQ ID NO: 575 - protein, 362 aa, Artificial Sequence
  Modified TdT Sequence
MENLYFQGTVSQYACQRRTTMENHNQIFTDAFAILAENAEFNESEGPALAFRRAASLLKSLPHAISSSKDLEGLPCLGDQTKAVIEDILEYGQCSKVQDVLCDDRYKTIKLFTSVFGVGLKTAEKWYRKGFHSLEEVQADKAIQFTKMQKAGFLYYDDISAAVCKAEADAIGCIVEETVRLIAPDAIVTLTGGFRRGKECGHDVDFLITTPEMGKEQLLPKVINLLEKKGLLLYYDLVESTFDKTRLPCRKFEAMDHFQKCFAIIKLKKELAAGRVQKDWKAIRVDFVMPPVDNFAFALLGWTGSRQFERDLRRFARHERKMLLDRHALYDKTKKIFLPAKTEEDIFAHLGLDYIPPWQRNA

SEQ ID NO: 576 - protein, 362 aa, Artificial Sequence
  Modified TdT Sequence
MENLYFQGTVSQYACQRRTTMENHNQIFTDAFAILAENAEFNESEGPCVAFRRAASLLKSLPHAISSSKDLEGLPCLGDQTKAVIEDILEYGQCSKVQDVLCDDRYQTIKLFTSVFGVGLKTAEKWYRKGFHSLEEVQADKAIHFTKMQKAGFLYYDDISAAVCKAEADAIGQIVEETVRLIAPDAIVTLTGGFRRGKEIGHDVDFLITTPEMGKEQLLPRVINLLEKKGLLLYYDLVESTFDKTRLPCRKFEAMDHFQKCFAIIKLKKELADGRVQKDWKAIRVDFVMPPVDNFAFALLGWTGSRQFERDLRRFARHERKMLLDRHALYDRTKKIFLPAKTEEDIFAHLGLDYIPPWQRNA

SEQ ID NO: 577 - protein, 362 aa, Artificial Sequence
  Modified TdT Sequence
MENLYFQGTVSQYACQRRTTMENHNQIFTDAFAILAENAEFNESEGPALAFRRAASLLKSLPHAISSSKDLEDLPCLGDQTKAVIEDILEYGQCSKVQDVLCDDRYQTIKLFTSVFGVGLKTAEKWYRKGFHSLEEVQADKAIHFTKMQKAGFLYYDDISAAVCKAEADAIGQIVEETVRLIAPDAIVTLTGGFRRGKEIGHDVDFLITTPEMGKEQLLPRVINLLEKKGLLLYYDLVESTFDKTRLPCRKFEAMDHFQKCFAIIKLKKELAAGRVQKDWKAIRVDFVMPPVDNFAFALLGWTGSRQFERDLRRFARHERKMLLDRHALYDKTKKIFLPAKSEEDIFAHLGLDYIPPWQRNA

SEQ ID NO: 578 - protein, 362 aa, Artificial Sequence
  Modified TdT Sequence
MENLYFQGTVSQYACQRRTTMENHNQIFTDAFAILAENAEFNESEGPCLAFRRAASLLKSLPHAISRSKDLEGLPCLGDQTKAVIEDILEYGQCSKVQDVLCDDRYQTIKLFTSVFGVGLKTAEKWYRKGFHSLEDVQADKAIHFTKMQKAGFLYYDDISAAVCKAEADAIGQIVEETVRLIAPDAIVTLTGGFRRGKECGHDVDFLITTPEMGKEQLLPKVINLWEKKGLLLYYDLVESTFDKTRLPCRKFEAMDHFQKCFAIIKLKKELAAGRVQKDWKAIRVDFVMPPIDNFAFALLGWTGSRQFERDLRRFARHERKMLLDRHALYDKTKKIFLPAKTEEDIFAHLGLDYIPPWQRNA

SEQ ID NO: 579 - protein, 362 aa, Artificial Sequence
  Modified TdT Sequence
MENLYFQGTVSQYACQRRTTMENHNQIFTDAFAILAENAEFNESEGPCLAFRRAASLLKSLPHAISSSKDLEGLPCLGDRTKAVIEDILEYGQCSKVQDVLCDDRYQTIKLFTSVFGVGLKTAEKWYRKGFHSLEEVQADKAIHFTKMQKAGFLYYDDISAAVCKAEADAIGQIVEETVRLIAPDAILTLTGGFRRGKECGHDVDFLITTPEMGKEQLLPKVINLWEKKGLLLYYDLVESTFDKTRLPCRKFEAMDHFQKCFAIIKLKKQLAAGRVQKDWKAIRVDFVMPPVDNFAFALLGWTGSRQFERDLRRFARHERKMLLDRHALYDKTKKIFLPAKTEEDIFAHLGLDYIPPWQRNA

SEQ ID NO: 580 - protein, 362 aa, Artificial Sequence
  Modified TdT Sequence
MENLYFQGTVSQYACQRRTTMENHNQIFTDAFAILAENAEFNENEGPALAFRRAASLLKSLPHAISSSKDLEGLPCLGDQTKAVIEDILEYGQCSKVQDVLCDDRYQTIKLFTSVFGVGLKTAEKWYRKGFHSLEEVQADKAIQFTKMQKAGFLYYDDISAAVCKAEADAIGQIVEETVRLIAPDAIVTLTGGFRRGKEIGHDVDFLITTPEMGKEQLLPKVINLLEKKGLLLYYHLVESTFDKTRLPCRKFEAMDHFQKCFAIIKLKKELAAGRVQKDWKAIRVDFVMPPIDNFAFALLGWTGSRQFERDLRRFARHERKMLLDRHALYDKTKKIFLPAKTEEDIFAHLGLDYIPPWQRNA

SEQ ID NO: 581 - protein, 362 aa, Artificial Sequence
  Modified TdT Sequence
MENLYFQGTVSQYACQRRTTMENNNQIFTDAFAILAENAEFNESEGPAVAFRRAASLLKSLPHAISSSKDLEGLPCLGDQTKAVIEDILEYGQCSKVQDVLCDDRYQTIKLFTSVFGVGLKTAEKWYRKGFHSLEEVQADKAIHFTKMQKAGFLYYDDISAAVCKAEADAIGQIVEETVRLIAPDAIVTLTGGFRRGKEIGHDVDFLITTPEMGKEQLLPRVINLLEKKGLLLYYDLVESTFDKTRLPCRKFEAMDHFQKCFAIIKLKKELAAGRVQKDWKAIRVDFVMPPVDNFAFALLGWTGSRQFERDLRRFARHERKMLLDRHALYDKTKKIFLPAKTEEDIFAHLGLDYIPPWQRNA

SEQ ID NO: 582 - protein, 362 aa, Artificial Sequence
  Modified TdT Sequence
MENLYFQGTVSQYACQRRTTMENHNQIFTDAFAILAENAEFNESEGPALAFRRAASLLKSLPHAISSSKDLEGLPCLGDQTKAVIEEILEYGQCSKVQDVLCDDRYQTIKLFTSVFGVGLKTAEKWYRKGFHSLEEVQADKAIQFTKMQKAGFLYYDDISAAVCKAEADAIGQIVEETVRKIAPDAIVTLTGGFRRGKEIGHDVDFLITTPEMGKEQLLPKVINLLEKKGLLLYYDLVESTFDKTRLPCRKFEAMDHFQKCWAIIKLKKELAAGRVQKDWKAIRVDFVMPPVDNFAFALLGWTGSRQFERDLRRFARHERKMLLDRHALYDKTKKIFLPAKTEEDIFAHLGLDYIPPWQRNA

SEQ ID NO: 583 - protein, 362 aa, Artificial Sequence
  Modified TdT Sequence
MENLYFQGTVSQYACQRRTTMENHNQIFTDAFAILAENAEFNESEGPCLAFRRAASLLKSLPHAISSSKDLEGLPCLGDRTKAVIEDILEYGQCSKVQDVLCDDRYQTIKQFTSVFGVGLKTAEKWYRKGFHSLEEVQADKAIHFTKMQKAGFLYYDDISAAVCKAEADAIGQIVEETVRLIAPDAIVTLTGGFRRGKECGHDVDFLITTPEMGKEQLLPKVINLWEKKGLLLYYDLVESTFDKTRLPCRKFEAMDNFQKCFAIIKLKKELAAGRVQKDWKAIRVDFVMPPVDNFAFALLGWTGSRQFERDLRRFARHERKMLLDRHALYDKTKKIFLPAKTEEDIFAHLGLDYIPPWQRNA

SEQ ID NO: 584 - protein, 362 aa, Artificial Sequence
  Modified TdT Sequence
MENLYFQGTVSQYACQRRTTMENHNQIFTDAFAILAENAEFNESEGPALAFRRAASLLKSLPHAISSSKDLEGLPCLGDQTKAVIEDILEYGQCSKVQDVLCDDRYQTIKLFTSVFGVGLKTAEKWYRKGFHSLEEVQADKAIQFTKMQKAGFLYYDDISAAVCKAEADAIGQIVEETVRLIAPDAIVTLTGGFRRGKECGHDVDFLITTPEMGKEQLLPDVINLLEKKGLLLYYDLIESTFDKTRLPCRKFEAMDHFQKCFAIIRLKKELAAGRVQKDWKAIRVDFVMPPIDNFAFALLGWTGSRQFERDLRRFARHERKMLLDRHALYDKTKKIFLPAKTEEDIFAHLGLEYIPPWQRNA

SEQ ID NO: 585 - protein, 362 aa, Artificial Sequence
  Modified TdT Sequence
MENLYFQGTVSQYACQRRTTMENHNQIFTDAFAILAENAEFNESEGPCLAFRRAASLLKSLPHAISSSKDLEGLPCLGDQTKAVMEDILEYGQCSKVQDVLCDDRYQTIKLFTSVFGVGLKTAEKWYRKGFHSLEEVQADKAIHFTKMQKAGFLYYDDISAAVCKAEADAIGQIVEETVRLIAPDAILTLTGGFRRGKECGHDVDFLITTPEMGKEQLLPKVINLWEKKGLLLYYDLVESTFDKSRLPCRKFEAMDHFQKCFAIIKLKKELAAGRVQKDWKAIRVDFVMPPVDNFAFALLGWTGSRQFERDLRRFARHERKMLLDRHALYDKTKKIFLPAKTEEDIFAHLGLDYIPPWQRNA

SEQ ID NO: 586 - protein, 362 aa, Artificial Sequence
  Modified TdT Sequence
MENLYFQGTVSQYACQRRTTMENHNQIFTDAFAILAENAEFNESEGPCLAFRRAASLLKSLPHAISSSKDLEGLPCLGDQTKAVIEDILEYGQCSKVQDVLCDDRYQTIKLFTSVFGVGLKTAEKWYRKGFHSLEEVQADKAIHFTKMQKAGFLYYDDISAAVCKAEADAIGQIVEETVRGIAPDAILTLTGGFRRGKECGHDVDFLITTPEMGKEQLLPKVIDLWEKKGLLLYYDLVESTFDKTRLPCRKFEAMDHFQKCFAIIKLKKELAAGRVQKDWKAIRVDFVMPPVDNFAFALLGWTGSRQFERDLRRFARHERKMLLDRHALYDKTKKIFLPAKTEEDIFAHLGLDYIPPWQRNA

SEQ ID NO: 587 - protein, 362 aa, Artificial Sequence
  Modified TdT Sequence
MENLYFQGTVSQYACQRRTTMENHNQVFTDAFAILAENAEFNESEGPCLAFRRAASLLKSLPHAISSSKDLEGLPCLGDQTKAVIEDILEYGQCSKVQDVLCDDRYQTIKLFTSVFGVGPKTAEKWYRKGFHSLEEVQADKAIHFTKMQKAGFLYYDDITAAVCKAEADAIGQIVEETVRLIAPDAIVTLTGGFRRGKEIGHDVDFLITTPEMGKEQLLPRVINLLEKKGLLLYYDLVESTFDKTRLPCRKFEAMDHFQKCFAIIKLKKELAAGRVQKDWKAIRVDFVMPPVDNFAFALLGWTGSRQFERDLRRFARHERKMLLDRHALYDKTKKIFLPAKTEEDIFAHLGLDYIPPWQRNA

SEQ ID NO: 588 - protein, 362 aa, Artificial Sequence
  Modified TdT Sequence
MENLYFQGTVSQYACQRRTTMENHNQIFTDAFAILAENAEFNESEGPCLAFRRAASLLKSLPHAISSSKDLQGLPCLGDQTKAVIEDILEYGQCSKVQDVLCDDRYQTIKLFTSVFGVGLKTAEKWYRKGFHSLEEVQADKAIHFTKMQKAGFLYYDDISAAVCKAEADAIGQIVEETVRLIAPDAIVTLTGGFRRGKECGHDVDFLITTPEMGKEQLLPRVINLWEKKGLLLYYDLVESTFDKTRLPCRKFEAMDHFQKCFAIIKLKKELAAGRVQKDWKAIRVDFVMPPVDRFAFALLGWTGSRQFERDLRRFARHERKMLLDRHALYDKTKKIFLPAKTEEDIFAHLGLDYIPPWQRNA

SEQ ID NO: 589 - protein, 362 aa, Artificial Sequence
  Modified TdT Sequence
MENLYFQGTVSQYACQRRTTMENHNQIFTDAFAILAENAEFNENEGPALAFRRAASLLKSLPHAISSSKDLEGLPCLGDQTKAVIEDILEYGQCSKVQDVLCDDRYQTIKLFTSVFGVGLKTAEKWYRKGFHSLEEVQADKAIQFTKMQKAGFLYYDDISAAVCKAEADAIGQIVEETVRLIAPDAIVTLTGGFRRAKECGHDVDFLITTPEMGKEQLLPDVINLLEKKGLLLYYDLVESTFDKTRLPCRKFEAMDHFQKCFAIIKLKKELAAGCVQKDWKAIRVDFVMPPIDNFAFALLGWTGSRQFERDLRRFARHERKMLLDRHALYDKTKKIFLPAKTEEDIFAHLGLDYIPPWQRNA

SEQ ID NO: 590 - protein, 362 aa, Artificial Sequence
  Modified TdT Sequence
MENLYFQGTVSQYACQRRTTMENHNQIFTDAFAILAENAEFNESEGPALAFRRAASLLKSLPHAISSSKDLEGLPCLGDQTKAVIEDILEYGQCSKVQDVLCDDRYQTIKLFTSVFGVGLKTAEKWYRKGFHSLEEVQADKAIHFTKMQRAGFLYYDDISAAVCKAEADAIGQIVEETVHGIAPDAIVTLTGGFRRGKEIGHDVDFLITTPEMGKEQLLPRVINLLEKKGLLLYYDLVESTFDKTRLPCRKFEAMDHFQKCFAIIKLKKELAAGRVQKDWKAIRVDFVMPPVDNFAFALLGWTGSRQFERDLRRFARHERKMLLDRHALYDKTKKIFLPAKTEEDIFAHLGLDYIPPWQRNA

SEQ ID NO: 591 - protein, 362 aa, Artificial Sequence
  Modified TdT Sequence
MENLYFQGTVSQYACQRRTTMENHNQIFTDAFAILAENAEFNESEGPCLAFRRAASLLKSLPHAISSSKDLEGLPCLGDQTKAVIEDILEYGQCSKVQDVLCDDRYQTIKLFTSVFGVGLKTAEKWYRKGFHSLEEVQADKAIHFTKMQKAGFLYYDDISAAVCKAEADAIGQIVEETVRGIAPDAIVTLTGGFRRGKEIGHDVDFLITTPEMGREQLLPRVINLLEKKGLLLYYDLVESTFDKTRLPCRKFEAMDHFQKCFAIIKLKKELAAGRVQKDWKAIRVDFVMPPVDCFAFALLGWTGSRQFERDLRRFARHERKMLLDRHALYDKTKKIFLPAKTEEDIFAHLGLDYIPPWQRNA

SEQ ID NO: 592 - protein, 362 aa, Artificial Sequence
  Modified TdT Sequence
MENLYFQGTVSQYACQRRTTMENHNQIFTDAFAILAENAEFNESEGPCLAFRRAASLLKSLPHAISSSKDLEGLPCLGDQTKAVIEDILEYGQCSKVQDVLCDDRYQTIKLFTSVFGVGLKTAEKWYRKGFHSLEEVQADKAIHFTKMQKAGFLYYDDISAAVCKAEADAIGQIVEETVRGIAPDAIVTLTGGFRRGKEIGHDVDFLITTPEMGKEQLLPRLIDLLEKKGLLLYYDLVESTFDKTRLPCRKFEAMDHFQKCFAIIKLKKELAAGRVQKDWKAIRVDFVMPPIDNFAFALLGWTGSRQFERDLRRFARHERKMLLDRHALYDKTKKIFLPAKTEEDIFAHLGLDYIPPWQRNA

SEQ ID NO: 593 - protein, 362 aa, Artificial Sequence
  Modified TdT Sequence
MENLYFQGTVSQYACQRRTTMENHNQIFTDAFAILAENAEFNESEVPALAFRRAASLLKSLPHAISSSKDLEGLPCLGDQTKAVIEDILEYGQCSKVQDVLCDDRYQTIKLFTSVFGVGLKTAEKWYRKGFHSLEEVQADKAIQFTKMQKAGFLYYDDISAAVCKAEADAIGQIVEETVHLIAPDAIVTLTGGFRRGKEIGHDVDFLITTPEMGKEQLLPKVIDLLEKKGLLLYYDLVESTFDKTRLPCRKFEAMDHFQKCWAIIKLKKELAAGRVQKDWKAIRVDFVMPPVDNFAFALLGWTGSRQFERDLRRFARHERKMLLDRHALYDKTKKIFLPAKTEEDIFAHLGLDYIPPWQRNA

SEQ ID NO: 594 - protein, 362 aa, Artificial Sequence
  Modified TdT Sequence
MENLYFQGTVSQYACQRRTTMENHNQIFTDAFAILAERAEFNESEGPCLAFRRAASLLKSLPHAISSSKDLEGLPCLGDQTKAVIEDIFEYGQCSKVQDVLCDDRYQTIKLFTSVFGVGLKTAEKWYRKGFHSLEEVQADKAIHFTKMQKAGFLYYDDISAAVCKAEADAIGQIVEETVRLIAPDAIVTLTGGFRRGKEIGHDVDFLITTPEMGKEQLLPRVINLLEKKGLLLYYDLVESTFDKTRLPCRKFEAMDHFQKCFAIIKLKKELAAGRVQKDWKAIRVDFVMPPIDNFAFALLGWTGSRQFERDLRRFARHERKMLLDRHALYDKTKKIFLPAKTEEDIFAHLGLDYIPPWQRNA

SEQ ID NO: 595 - protein, 362 aa, Artificial Sequence
  Modified TdT Sequence
MENLYFQGTVSQYACQRRTTMENHNQIFTDAFAILAENAEFNESEGPALAFRRAASLLKSLPHAISSSKDLEGLPCLGDQTKAVIEEILEYGQCSKVQDVLCDDRYKTIKLFTSVFGVGLKTAEKWYRKGFHSLEEVQADRAIQFTKMQKAGFLYYDDISAAVCKAEADAIGQIVEETVRLIAPDAIVTLTGGFRRGKEIGHDVDFLITTPEMGKEQLLPKVINLLEKKGLLLYYDLVESTFDKTRLPCRKFEAMDHFQKCFAIIKLKKELAAGRVQKDWKAIRVDFVMPPVDNFAFALLGWTGSRQFERDLRRFARHERKMLLDRHALYDKTKKIFLPAKTEEDIFAHLGLDYIPPWQRNA

SEQ ID NO: 596 - protein, 362 aa, Artificial Sequence
  Modified TdT Sequence
MENLYFQGTVSQYACQRRTTMENHNQIFTDAFAILAENAEFNESEGPCLAFRRAASLLKSLPHAISSSKDLEGLPCLGDQTKAVIEDILEYGQCSKVQDVLCDDRYQTIKQFTSVFGVGLKTAEKWYRKGFHSLEEVQADKAIHFTKMQKAGFLYYDDISAAVCKAEADAIGQIVEETVRLIAPDAIVTLTGGFRRGKECGHDVDFLITTPEMGKEQLLPKIINLWEKKGLLLYYDLVESTFDKSRLPCRKFEAMDHFQKCFAIIKLKKELAAGRVQKDWKAIRVDFVMPPVDNFAFALLGWTGSRQFERDLRRFARHERKMLLDRHALYDKTKKIFLPAKTEEDIFAHLGLDYIPPWQRNA

SEQ ID NO: 597 - protein, 362 aa, Artificial Sequence
  Modified TdT Sequence
MENLYFQGTVSQYACQRRTTMENHNQIFTDAFAILAENAEFNESEGPCVAFRRAASLLKSLPHAISSSKDLEGLPCLGDQTKAVIEDILEYGQCSKVQDVLCDDRYQTIKLFTSVFGVGLKTAEKWYRKGFHSLEEVQADKAIHFTKMQKAGFLYYDDISAAVCKAEADAIGQIVEETVRLIAPDAIVTLTGGFRRGKECGHDVDFLITTPEMGKEQLLPKIINLWEQKGLLLYYDLVESTFDKTRLPCRKFEAMDHFQKCFAIIKLKKELAAGRVQKDWKAIRVDFVMPPVDNFAFALLGWTGSRQFERDLRRFARHERKMLLDRHALYDKTKKIFLPAKTEEDIFAHLGLDYIPPWQRNA

SEQ ID NO: 598 - protein, 362 aa, Artificial Sequence
  Modified TdT Sequence
MENLYFQGTVSQYACQRRTTMENHNQIFTDAFAILAENAEFNESEGPALAFRRAASLLKSLPHAISSSKDLEGLPCLGDQTKAVIEDILEYGQCSKVQDVLCDDRYQTIKLFTSVFGVGLKTAEKWYRKGFHSLEEVQADKAIQFTKMQKAGFLYYDDISAAVCKAEADAIGQIVEETVRKIAPDAIVTLTGGFRRGKECGHDVDFLITTPEMGKEQLLPDVINLLEKKGLLLYYDLVESTFDKTRLPCRRFEAMDHFQKCFAIIKLKKELAAGRVQKDWKAIRVDFVMPPADNFAFALLGWTGSRQFERDLRRFARHERKMLLDRHALYDKTKKIFLPAKTEEDIFAHLGLEYIPPWQRNA

SEQ ID NO: 599 - protein, 362 aa, Artificial Sequence
  Modified TdT Sequence
MENLYFQGTVSQYACQRRTTMENRNQIFTDAFAILAENAEFNESEGPALAFRRAASLLKSLPHAISSSKDLEGLPCLGDQTKAVIEDILEYGQCSKVQDVLCDDRYKTIKLFTSVFGVGLKTAEKWYRKGFHSLEEVQADKAIQFTKMQKAGFLYYDDISAAVCKAEADAIGQIVEETVRLIAPDAIVTLTGGFRRGKECGHDVDFLITTPEKGKEQLLPDVINLLEKKGLLLYYDLVESTFDKTRLPCRKFEAMDHFQKCFAIIKLKKELAAGRVQKDWKAIRVDFVMPPIDNFAFALLGWTGSRQFERDLRRFARHERKMLLDRHALYDKTKKIFLPAKTEEDIFAHLGLDYIPPWQRNA

SEQ ID NO: 600 - protein, 362 aa, Artificial Sequence
  Modified TdT Sequence
MENLYFQGTVSQYACQRRTTMENHNQIFTDAFAILAENAEFNENEGPALAFRRAASLLKSLPHAISSSKDLEGLPCLGDQTKAVIEEILEYGQCSKVQDVLCDDRYQTIKLFTSVFGVGLKTAEKWYRKGFHSLEEVQADKAIQFTKMQKAGFLYYDDISAAVCKAEADAIGQIVEETVRLIAPDAIVTLTGGFRRGKECGHDVDFLITTPEQGKEQLLPDVINLLEKKGLLLYYDLVESTFDKTRLPCRKFEAMDHFQKCFAIIKLKKELAAGRVQKDWKAIRVDFVMPPIDNFAFALLGWTGSRQFERDLRRFARHERKMLLDRHALYDKTKKIFLPAKTEEDIFAHLGLEYIPPWQRNA

SEQ ID NO: 601 - protein, 362 aa, Artificial Sequence
  Modified TdT Sequence
MENLYFQGTVSQYACQRRTTMENHNQIFTDAFAILAENAEFNESEGPALAFRRAASLLKSLPHAISSSKDLEGLPCLGDQTKAVIEDILEYGQCSKVQDVLCDDRYQTIKLFTSVFGVGLKTAEKWYRKGFHSLEEVQADKAIQFTKMQKAGFLYYDDISAAVCKAEADAIGQIVEETVRLIAPDAIVTLTGGFRRGKEIGHDVDFLITTPEAGKEQLLPKVIDLLEKKGLLLFYDLVESTFDKTRLPCRKFEAMDHFQKCFAIIKLKKELAAGRVQKDWKAIRVDFVMPPVDNFAFALLGWTGSRQFERDLRRFARHERKMLLDRHALYDRTKKIFLPAKTEEDIFAHLGLDYIPPWQRNA

SEQ ID NO: 602 - protein, 362 aa, Artificial Sequence
  Modified TdT Sequence
MENLYFQGTVSQYACQRRTTMENHNQIFTDAFAILAENAEFNESEGPCLAFRRAASLLKSLPHAISCSKDLEGLPCLGDQTKAVIEDILEYGQCSKVQDVLCDDRYQTIKLFTSVFGVGLKTAEKWYRKGFHSLEEVQANKAIHFTKMQKAGFLYYDDISAAVCKAEADAIGQIVEETVRLIAPDAIVTLTGGFRRGKECGHDVDFLITTPEMGKEQLLPKVINLWEKKGLLLYYDLVESTFDKTRLPCRKFEAMDHFQKCFAIIKLKKELAAGRVQKDWKAIRVDFVMPPVDNFAFALLGWTGSRQFERDLRRFARHERKMLLDRHALYDRTKKIFLPAKTEEDIFAHLGLDYIPPWQRNA

SEQ ID NO: 603 - protein, 362 aa, Artificial Sequence
  Modified TdT Sequence
MENLYFQGTVSQYACQRRTTMENHNQIFTDAFAILAENAEFNESEGPCLAFRRAASLLKSLPHAISSSKDLEGLPCLGDQTKAVMEDILEYGQCSKVQDVLCDDRYQTIKLFTSVFGVGLKTAEKWYRKGFHSLEEVQADKAIHFTKMQKAGFLYYDDISAAVCKAEADAIGQIVEETVRLIAPDAIVTLTGGFRRGKECGHDVDFLITTPEMGKEQLLPKVINLWEKKGLLLYYDLVESTFDKTRLPCRKFEAMDHFQKCFAIIKLKKELAAGRVQKDWKAIRVDFVMPPIDNFAFALLGWTGSRQFERDLRRFARHERKMLLDRHALYDRTKKIFLPAKTEEDIFAHLGLDYIPPWQRNA

SEQ ID NO: 604 - protein, 362 aa, Artificial Sequence
  Modified TdT Sequence
MENLYFQGTVSQYACQRRTTMENHNQIFTDAFAILAENAEFNESEGPALAFRRAASLLKSLPHAISSSKDLEGLPCLGDQTKAVIEDILEYGQCSKVQDVLCDDRYQTIKLFTSVFGVGLKTAEKWYRKGFHSLEEVQADKAIQFTKMQRAGFLYYDDISAAVCKAEADAIGQIVEETVRLIAPDAIVTLTGGFRRGKEIGHDVDFLITTPEMGKEQLLPKVINLLEKKGLLLFYELVESTFDKTRLPCRKFEAMDHFQKCFAIIKLKKELAAGRVQKDWKAIRVDFVMPPVDNFAFALLGWTGSRQFERDLRRFARHERKMLLDRHALYDKTKKIFLPAKTEEDIFAHLGLDYIPPWQRNA

SEQ ID NO: 605 - protein, 362 aa, Artificial Sequence
  Modified TdT Sequence
MENLYFQGTVSQYACQRRTTMENHNQIFTDAFAILAENAEFNESEGPALAFRRAASLLKSLPHAISSSKDLEGLPCLGDQTKAVIEDILEYGQCSKVQDVLCDDRYQTIKLFTSVFGVGLKTAEKWYRKGFHSLEEVQADKAIQFTKMQKAGFLYYDDISAAVCKAEADAIGQIVEETVRLIAPDAIVTLTGGFRRGKSCGHDVDFLITTPEQGKEQLLPDVINLLEKKGLLLYYDLVESTFDKTRLPCRRFEAMDHFQKCFAIIKLKKELAAGRVQKDWKAIRVDFVMPPIDNFAFALLGWTGSRQFERDLRRFARHERKMLLDRHALYDKTKKIFLPAKTEEDIFAHLGLDYIPPWQRNA

SEQ ID NO: 606 - protein, 362 aa, Artificial Sequence
  Modified TdT Sequence
MENLYFQGTVSQYACQRRTTMENHNQIFTDAFAILAENAEFNESEGPSLAFRRAASLLKSLPHAISSSKDLEGLPCLGDQTKAVIEDILEYGQCSKVQDVLCDDRYQTIKLFTSVFGVGLKTAEKWYRKGFHSLEEVQADKAIQFTKMQKAGFLYYDDISAAVCKAEADAIGQIVEETVRKIAPDAIVTLTGGFRRGKEIGHDVDFLITTPEMGKEQLLPKVIDLLEKKGLLLYYDLVESTFDKTRLPCRKFEAMDHFQKCFAIIKLKKELAAGRVQKDWKAIRVDFVMPPIDNFAFALLGWTGSRQFERDLRRFARHERKMLLDRHALYDKTKKIFLPAKTEEDIFAHLGLDYIPPWQRNA

SEQ ID NO: 607 - protein, 362 aa, Artificial Sequence
  Modified TdT Sequence
MENLYFQGTVSQYACQRRTTMENHNQIFTDAFAILAENAEFNESEGPCLAFRRAASLLKSLPHAISSSKDLEGLPCLGDQTKAVIEDILEYGQCSKVQDVLCDDRYQTIKLFTSVFGVGLKTAEKWYRKGFHSLEDVQANKAIHFTKMQKAGFLYYDDISAAVCKAEADAIGQIVEETVRLIAPDAIVTLTGGFRRGKECGHDVDFLITTPEMGKEQLLPKVINLWEKKGLLLYYDLVESTFDKTRLPCRKFEAMDNFQKCFAIIKLKKELAAGRVQKDWKAIRVDFVMPPVDNFAFALLGWTGSRQFERDLRRFARHERKMLLDRHALYDKTKKIFLPAKTEEDIFAHLGLDYIPPWQRNA

SEQ ID NO: 608 - protein, 362 aa, Artificial Sequence
  Modified TdT Sequence
MENLYFQGTVSQYACQRRTTMENHNQIFTDAFAILAENAEFNENEGPCLAFRRAASLLKSLPHAISSSKDLEGLPCLGDQTKAVIEDILEYGQCSKVQDVLCDDRYQTIKLFTSVFGVGLKTAEKWYRKGFHSLEEVQADKAIHFSKMQKAGFLYYDDISAAVCKAEADAIGRIVEETVRLIAPDAIVTLTGGFRRGKECGHDVDFLITTPEMGKEQLLPKVINLWEKKGLLLYYDLVESTFDKTRLPCRKFEAMDHFQKCFAIIKLKKELAAGRVQKDWKAIRVDFVMPPVDNFAFALLGWTGSRQFERDLRRFARHERKMLLDRHALYDKTKKIFLPAKTEEDIFAHLGLDYIPPWQRNA

SEQ ID NO: 609 - protein, 362 aa, Artificial Sequence
  Modified TdT Sequence
MENLYFQGTVSQYACQRRTTMENHNQIFTDAFAILAENAEFNESEGPALAFRRAASLLKSLPHAISSSKDLEGLPCLGDQTKAVIEEILEYGQCSKVQDVLCDDRYQTIKLFTSVFGVGLKTAEKWYRKGFHSLEEVQADKAIQFTKMQKAGFLYYDDISAAVCKAEADAIGQIVEETVRLMAPDAIVTLTGGFRRGKECGHDVDFLITTPEMGKEQLLPDVINLLEKKGLLLYYDLVESTFDKTRLPCRKFEAMDHFQKCFAIIRLKKELAAGRVQKDWKAIRVDFVMPPIDNFAFALLGWTGSRQFERDLRRFARHERKMLLDRHALFDKTKKIFLPAKTEEDIFAHLGLDYIPPWQRNA

SEQ ID NO: 610 - protein, 362 aa, Artificial Sequence
  Modified TdT Sequence
MENLYFQGTVSQYACQRRTTMENHNQIFTDAFAILAENAEFNESEGPCLAFRRAASLLKSLPHAISSSKDLEGLPCLGDRTKAVMEDILEYGQCSKVQDVLCDDRYQTIKLFTSVFGVGLKTAEKWYRKGFHSLEEVQAEKAIHFTKMQKAGFLYYDDISAAVCKAEADAIGQIVEETVRLIAPDAIVTLTGGFRRGKECGHDVDFLITTPEMGKEQLLPKVINLWEKKGLLLYYDLVESTFDKTRLPCRKFEAMDHFQKCFAIIKLKKELAAGRVQKDWKAIRVDFVMPPVDNFAFALLGWTGSRQFERDLRRFARHERKMLLDRHALYDKTKKIFLPAKTEEDIFAHLGLDYIPPWQRNA

SEQ ID NO: 611 - protein, 362 aa, Artificial Sequence
  Modified TdT Sequence
MENLYFQGTVSQYACQRRTTMENHNQIFTDAFAILAENAEFNESEGPALAFRRAASLLKSLPHAISSSKDLEGLPCLGDQTKAVIEDILEYGQCSKVQDVLCDDRYQTIKLFTSVFGVGLKTAEKWYRKGFHSLEEVQADKAIHFTKMQKAGFLYYDDISAAVCKAEADAIGCIVEETVRLIAPDAIVTLTGGFRRGKEIGHDVDFLITTPEMGKEQLLPKVINLLEKKGLLLYYDLVESTFDKTRLPCRKFEAMDHFQKCFAIIKLKKELAAGRVQKDWKAIRVDFVMPPIDNFAFALLGWTGSRQFERDLRRFARHERKMLLDRHALYDRTKKIFLPAKTEEDIFAHLGLDYIPPWQRNA

SEQ ID NO: 612 - protein, 362 aa, Artificial Sequence
  Modified TdT Sequence
MENLYFQGTVSQYACQRRTTMENHNQIFTDAFAILAENAEFNESEGPALAFRRAASLLKSLPHAISSSKDLEGLPCLGDQTKAVIEDILEYGQCSKVQDVLCDDRYQTIKLFTSVFGVGLKTAEKWYRMGFHSLEEVQADKAIQFTKMQKAGFLYYDDISAAVCKAEADAIGQIVEETVRLIAPDAIVTLTGGFRRGKEIGHDVDFLITTPEMGREQLLPKVIDLLEKKGLLLYYDLVESTFDKTRLPCRKFEAMDHFQKCFAIIKLKKELAAGRVQKDWKAIRVDFVMPPVDNFAFALLGWTGSRQFERDLRRFARHERKMLLDRHALYDKTKKIFLPAKTEEEIFAHLGLDYIPPWQRNA

SEQ ID NO: 613 - protein, 362 aa, Artificial Sequence
  Modified TdT Sequence
MENLYFQGTVSQYACQRRTTMENHNQIFTDAFAILAENAEFNESEGPALAFRRAASLLKSLPHAISSSKDLEGLPCLGDQTKAVIEDILEYGQCSKVQDVLCDDRYQTIKLFTSVFGVGLKTAEKWYRKGFHSLEEVQADKAIHFTKMQKAGFLYYDDISAAVCKAEADAIGQIVEETVRLIAPDAIVTLTGGFRRGKEIGHDVDFLITTPEMGKEQLLPRVINLLEKKGLLLYYDLVESTFDKTRLPCRKFEAMDHFQKCFAIIKLKKELADGRVQKDWKAIRVDFVLPPVDNFAFALLGWTGSRQFERDLRRFARHERKMLLDRHALYDKTKKIFLPAKTEEDIFAHLGLDYIPPWQRNA

SEQ ID NO: 614 - protein, 362 aa, Artificial Sequence
  Modified TdT Sequence
MENLYFQGTVSQYACQRRTTMENHNQIFTDAFAILAENAEFNESEGPALAFLRAASLLKSLPHAISSSKDLEGLPCLGDQTKAVIEDILEYGQCSKVQDVLCDDRYQTIKLFTSVFGVGLKTAEKWYRKGFHSLEEVQADKAIQFTKMQKAGFLYYDDISAAVCKAEADAIGQIVEETVRLIAPDAIVTLTGGFRRGKECGHDVDFLITTPEMGKEQLLPKLINLLEKKGLLLYYDLVESTFDKTRLPCRKFEAMDHFQKCFAIIKLKKELAAGRVQKDWKAIRVDFVMPPVDNFAFALLGWTGSRQFERDLRRFARHERKMLLDRHALYDKTKKIFLPAKTEEDIFAHLGLDYIPPWQRNA

SEQ ID NO: 615 - protein, 362 aa, Artificial Sequence
  Modified TdT Sequence
MENLYFQGTVSQYACQRRTTMENHNQIFTDAFAILAENAEFNESEGPCLAFRRAASVLKSLPHAISSSKDLEGLPCLGDQTKCVIEDILEYGQCSKVQDVLCDDRYQTIKLFTSVFGVGLKTAEKWYRKGFHSLEEVQADKAIHFTKMQKAGFLYYDDISAAVCKAEADAIGQIVEETVRLIAPDAIVTLTGGFRRGKEIGHDVDFLITTPEMGKEQLLPKVINLWEKKGLLLYYDLVESTFDKTRLPCRKFEAMDHFQKCFAIIKLKKELAAGRVQKDWKAIRVDFVMPPVDNFAFALLGWTGSRQFERDLRRFARHERKMLLDRHALYDKTKKIFLPAKTEEDIFAHLGLDYIPPWQRNA

SEQ ID NO: 616 - protein, 362 aa, Artificial Sequence
  Modified TdT Sequence
MENLYFQGTVSQYACQRRTTMENHNQIFTDAFAILAENAEFNESEGPCLAFRRAASVLKSLPHAISSSKDLEGLPCLGDQTKAVIEDILEYGQCSKVQDVLCDDRYQTIKLFTSVFGVGLKTAEKWYRMGFHSLEEVQADKAIHFTKMQKAGFLYYDDISAAVCKAEADAIGQIVEETVRLIAPDAIVTLTGGFRRGKECGHDVDFLITTPEMGKEQLLPKVINLWEKKGLLLYYDLVESTFDKTRLPCRKFEAMDHFQKCFAIIKLKKELAAGRVQKDWKAIRVDFVMPPVDNFAFALLGWTGSRQFERDLRRFARHERRMLLDRHALYDKTKKIFLPAKTEEDIFAHLGLDYIPPWQRNA

SEQ ID NO: 617 - protein, 362 aa, Artificial Sequence
  Modified TdT Sequence
MENLYFQGTVSQYACQRRTTMENHNQIFTDAFAILAENAEFNESEGPCLAFRRAASLLKSLPHAISSSKDLEGLPCLGDQTKCVIEDILEYGQCSKVQDVLCDDRYQTIKLFTSVFGVGLKTAEKWYRKGFHSLEEVQADKAIHFTKMQKAGFLYYDDISAAVCKAEADAIGQIVEETVRLIAPDAIVTLTGGFRRGKECGHDVDFLITTPEMGKEQLLPRIINLWEKKGLLLYYDLVESTFDKTRLPCRKFEAMDHFQKCFAIIKLKKELAAGRVQKDWKAIRVDFVMPPVDNFAFALLGWTGSRQFERDLRRFARHERKMLLDRHALYDKTKKIFLPAKTEEDIFAHLGLDYIPPWQRNA

SEQ ID NO: 618 - protein, 362 aa, Artificial Sequence
  Modified TdT Sequence
MENLYFQGTVSQYACQRRTTMENHNQIFTDAFAILAENAEFNESEGPALAFRRAASLLKSLPHAISSSKDLEGLPCLGDQTKAVIEDILEYGQCSKVQDVLCDDRYQTIKLFTSVFGVGLKTAEKWYRKGFHSLEEVQADKAIHFTKMQRAGFLYYDDISAAVCKAEADAIGQIVEETVRLIAPDAIVTLTGGFRRGKEIGHDVDFLITTPEAGKEQLLPKVINLLEKKGLLLYYDLVESTFDKTRLPCRKFEAMDHFQKCFAIIKLKKELAAGRVQKDWKAIRVDFVMPPVDNFAFALLGWTGSRQFERDLRRFARHERKMLLDRHALYDKTKKIFLPAKTEEDIFAHLGLDYIPPWQRNA

SEQ ID NO: 619 - protein, 362 aa, Artificial Sequence
  Modified TdT Sequence
MENLYFQGTVSQYACQRRTTMENHNQIFTDAFAILAENAEFNESEGPALAFRRAASLLKSLPHAISSSKDLEGLPCLGDQTKAVIEDILEYGQCSKVQDVLCDDRYQTIKLFTSVFGVGLKTAEKWYRKGFHSLEEVQADKAIQFTKMQKAGFLYYDDISAAVCKAEADAIGQIVEETVRKIAPDALVTLTGGFRRGKECGHDVDFLITTPEMGKEQLLPDVINLLEKKGLLLYYDLVESTFDKTRLPCRKFEAMDHFQKCFAIIKLKKELAAGRVQKDWKAIRVDFVMPPADNFAFALLGWTGSRQFERDLRRFARHERKMLLDRHALYDKTKKIFLPAKTEEDIFAHLGLDYIPPWQRNA

SEQ ID NO: 620 - protein, 362 aa, Artificial Sequence
  Modified TdT Sequence
MENLYFQGTVSQYACQRRTTMENHNQIFTDAFAILAENAEFNESEGPALAFRRAASLLKSLPHAISSSKDLEGLPCLGDQTKAVIEDILEYGQCSKVQDVLCDDRYQTIKLFTSVFGVGLKTAEKWYRKGFHSLEEVQADKAIQFTKMQKAGFLYYDDISAAVCKAEADAIGQIVEETVRLIAPDALVTLTGGFRRAKECGHDVDFLITTPEMGKEQLLPDVINLLEKKGLLLYYDLVESTFDKTRLPCRKFEAMDHFQKCFAIIKLKKELAAGRVQKDWKAIRVDFVMPPIDNFAFALLGWTGSRQFERDLRRFARHERKMLLDRHALYDKTKKIFLPAKTEEDIFAHLGLEYIPPWQRNA

SEQ ID NO: 621 - protein, 362 aa, Artificial Sequence
  Modified TdT Sequence
MENLYFQGTVSQYACQRRTTMENHNQIFTDAFAILAENAEFNENEGPCLAFRRAASLLKSLPHAISSSKDLEGLPCLGDQTKAVIEDILEYGQCSKVQDVLCDDRYQTIKLFTSVFGVGLKTAEKWYRKGFHSLEEVQADKAIHFTKMQKAGFLYYDDISAAVCKAEADAIGQIVEETVRLIAPDAIVTLTGGFRRGKECGHDVDFLITTPEAGKEQLLPRVINLLEKKGLLLYYDLVESTFDKTRLPCRKFEAMDHFQKCFAIIKLKKELAAGRVQKDWKAIRVDFVMPPVDNFAFALLGWTGSRQFERDLRRFARHERKMLLDRHALYDKTKKIFLPAKTEEDIFAHLGLDYIPPWQRNA

SEQ ID NO: 622 - protein, 362 aa, Artificial Sequence
  Modified TdT Sequence
MENLYFQGTVSQYACQRRTTMENHNQVFTDAFAILAENAEFNESEGPCLAFRRAASLLKSLPHAISSSKDLEGLPCLGDQTKAVIEDILEYGQCSKVQDVLCDDRYQTIKLFTSVFGVGLKTAEKWYRMGFHSLEEVQADKAIHFTKMQRAGFLYYDDISAAVCKAEADAIGQIVEETVRLIAPDAIVTLTGGFRRGKEIGHDVDFLITTPEMGKEQLLPRVINLLEKKGLLLYYDLVESTFDKTRLPCRKFEAMDHFQKCFAIIKLKKELAAGRVQKDWKAIRVDFVMPPVDNFAFALLGWTGSRQFERDLRRFARHERKMLLDRHALYDKTKKIFLPAKTEEDIFAHLGLDYIPPWQRNA

SEQ ID NO: 623 - protein, 362 aa, Artificial Sequence
  Modified TdT Sequence
MENLYFQGTVSQYACQRRTTMENHNQIFTDAFAILAENAEFNESEGPALAFRRAASLLKSLPHAISSSKDLEGLPCLGDQTKAVIEDILEYGQCSKVQDVLCDDRYQTIKLFTSVFGVGLKTAEKWYRKGFHSLEEVQADKAIQFTKMQKAGFLYYDDISAAVCKAEADAIGQIVEETVHLIAPDAIVTLTGGFRRGKSCGHDVDFLITTAEMGKEQLLPDVINLLEKKGLLLYYDLVESTFDKTRLPSRKFEAMDHFQKCFAIIKLKKELAAGRVQKDWKAIRVDFVMPPIDNFAFALLGWTGSRQFERDLRRFARHERKMLLDRHALYDKTKKIFLPAKTEEDIFAHLGLDYIPPWQRNA

SEQ ID NO: 624 - protein, 362 aa, Artificial Sequence
  Modified TdT Sequence
MENLYFQGTVSQYACQRRTTMENHNQIFTDAFAILAENAEFNESEGPCLAFRRAASLLKSLPHAISSSKDLEGLPCLGDQTKAVIEDILEYGQCSKVQDVLCDDRYQTIKLFTSVFGVGLKTAEKWYRKGFHSLEEVQADKAIHFTKMQKAGFLYYDDITAAVCKAEADAIGQIVEETVHLIAPDAIVTLTGGFRRGKEIGHDVDFLITTPEMGREQLLPRVINLLEKKGLLLYYDLVESTFDKTRLPCRKFEAMDHFQKCFAIIKLKKELAAGRVQKDWKAIRVDFVMPPIDNFAFALLGWTGSRQFERDLRRFARHERKMLLDRHALYDKTKKIFLPAKTEEDIFAHLGLDYIPPWQRNA

SEQ ID NO: 625 - protein, 362 aa, Artificial Sequence
  Modified TdT Sequence
MENLYFQGTVSQYACQRRTTMENHNQIFTDAFAILAENAEFNENEGPCLAFRRAASLLKSLPHAISSSKDLEGLPCLGDQTKCVIEDILECGQCSKVQDVLCDDRYQTIKLFTSVFGVGLKTAEKWYRKGFHSLEEVQADKAIHFTKMQKAGFLYYDDISAAVCKAEADAIGQIVEETVRLIAPDAIVTLTGGFRRGKECGHDVDFLITTPEMGKEQLLPKVINLWEKKGLLLYYDLVESTFDKTRLPCRKFEAMDHFQKCFAIIKLKKELAAGRVQKDWKAIRVDFVMPPVDNFAFALLGWTGSRQFERDLRRFARHERKMLLDRHALYDKTKKIFLPAKTEEDIFAHLGLDYIPPWQRNA

SEQ ID NO: 626 - protein, 362 aa, Artificial Sequence
  Modified TdT Sequence
MENLYFQGTVSQYACQRRTTMENNNQIFTDAFAILAENAEFNESEGPCLAFRRAASLLKSLPHAISSSKDLEGLPCLGDQTKAVIEDILEYGQCSKVQDVLCDDRYQTIKLFTSVFGVGLKTAEKWYRKGFHSLEEVQADKAIHFTKMQKAGFLYYDDISAAVCKAEADAIGQIVEETVHLIAPDAIVTLTGGFRRGKEIGHDVDFLITTPEMGKEQLLPRVINLLEKKGLLLYYDLVESTFDKTRLPCRKFEAMDHFQKCFAIIKLKKELAAGRVQKDWKAIRVDFVLPPVDNFAFALLGWTGSRQFERDLRRFARHERKMLLDRHALYDKTKKIFLPAKTEEDIFAHLGLDYIPPWQRNA

SEQ ID NO: 627 - protein, 362 aa, Artificial Sequence
  Modified TdT Sequence
MENLYFQGTVSQYACQRRTTMENHNQIFTDAFAILAENAEFNESEGPCLAFRRAASLLKSLPHAISSSKDLEGLPCLGDQTKAVIEDILEYGQCSKVQDVLCDDRYQTIKLFTSVFGVGLKTAEKWYRKGFHSLEEVQADNAIHFTKMQKAGFLYYDDISAAVCKAEADAIGQIVEETVRLIAPDAIVTLTGGFRRGKECGHDVDFLITTPEMGKEQLLPKVIDLWEKKGLLLYYDLVESTFDKTRLPCRKFEAMDHFQKCFAIIKLKAELAAGRVQKDWKAIRVDFVMPPVDNFAFALLGWTGSRQFERDLRRFARHERKMLLDRHALYDKTKKIFLPAKTEEDIFAHLGLDYIPPWQRNA

SEQ ID NO: 628 - protein, 362 aa, Artificial Sequence
  Modified TdT Sequence
MENLYFQGTVSQYACQRRTTMENHNQIFTDAFAILAENAEFNESEGPCLAFRRAASLLKSLPHAISRSKDLEGLPCLGDQSKAVIEDILEYGQCSKVQDVLCDDRYQTIKLFTSVFGVGLKTAEKWYRKGFHSLEEVQADKAIHFTKMQKAGFLYYDDISAAVCKAEADAIGQIVEETVRLIAPDAIVTLTGGFRRGKECGHDVDFLITTPEMGKEQLLPKVIDLWEKKGLLLYYDLVESTFDKTRLPCRKFEAMDHFQKCFAIIKLKKELAAGRVQKDWKAIRVDFVMPPVDNFAFALLGWTGSRQFERDLRRFARHERKMLLDRHALYDKTKKIFLPAKTEEDIFAHLGLDYIPPWQRNA

SEQ ID NO: 629 - protein, 362 aa, Artificial Sequence
  Modified TdT Sequence
MENLYFQGTVSQYACQRRTTMENHNQIFTDAFAILAENAEFNESEGPALAFRRAASLLKSLPHAISSSKDLEGLPCLGDQTKAVIEEILEYGQCSKVQDVLCDDRYKTIKLFTSVFGVGLKTAEKWYRKGFHSLEEVQADKAIQFTKMQKAGFLYYDDISAAVCKAEADAIGQIVEETVRLIAPDAIVTLTGGFRRGKECGHDVDFLITTPEMGKEQLLPDVINLLEKKGLLLYYDLIESTFDKTRLPCRKFEAMDHFQKCFAIIKLKKELAAGRVQKDWKAIRVDFVMPPIDNFAFALLGWTGSRQFERDLRRFARHERKMLLDRHALYDKTKKIFLPAKTEEDIFAHLGLDYIPPWQRNA

SEQ ID NO: 630 - protein, 362 aa, Artificial Sequence
  Modified TdT Sequence
MENLYFQGTVSQYACQRRTTMENHNQIFTDAFAILAENAEFNESEGPCLAFRRAASLLKSLPHAISSSKDLEGLPCLGDQTKCVIEDILEYGQCSKVQDVLCDDRYQTIKLFTSVFGVGLKTAEKWYRKGFHSLEEVQAEKAIHFTKMQKAGFLYYDDISAAVCKAEADAIGRIVEETVRLIAPDAIVTLTGGFRRGKECGHDVDFLITTPEMGKEQLLPKVINLWEKKGLLLYYDLVESTFDKTRLPCRKFEAMDHFQKCFAIIKLKKELAAGRVQKDWKAIRVDFVMPPVDNFAFALLGWTGSRQFERDLRRFARHERKMLLDRHALYDKTKKIFLPAKTEEDIFAHLGLDYIPPWQRNA

SEQ ID NO: 631 - protein, 362 aa, Artificial Sequence
  Modified TdT Sequence
MENLYFQGTVSQYACQRRTTMENHNQIFTDAFAILAENAEFNESEGPCLAFLRAASLLKSLPHAISSSKDLEGLPCLGDQTKAVIEDILEYGQCSKVQDVLCDDRYQTIKLFTSVFGVGLKTAEKWYRKGFHSLEEVQADKAIHFTKMQKAGFLYYDDISAAVCKAEADAIGQIVEETVRLIAPDAIVTLTGGFRRGKECGHDVDFLITTPEMGKEQLLPKVINLWEKKGLLLYYDLVESTFDKSRLPCRKFEAMDHFQKCFAIIKLKKELADGRVQKDWKAIRVDFVMPPVDNFAFALLGWTGSRQFERDLRRFARHERKMLLDRHALYDKTKKIFLPAKTEEDIFAHLGLDYIPPWQRNA

SEQ ID NO: 632 - protein, 362 aa, Artificial Sequence
  Modified TdT Sequence
MENLYFQGTVSQYACQRRTTMENHNQIFTDAFAILAENAEFNESEGPCLAFRRAASLLKSLPHAISSSKDLEGLPCLGDQTKAVIEDILEYGQCSKVQDVLCDDRYQTIKLFTSVFGVGLKTAEKWYRKGFHSLEEVQADKAIHFTKMQKAGFLYYDDISAAVCKAEADAIGQIVEETVRLIAPDAIVTLTGGFRRGKEIGHDVDFLITTPEMGKEQLLPKVINLLEKKGLLLYYDLVESTFDKTRLPCRKFEAMDHFQKCFAIIKLKKELAAGRVQKDWKAIRVDFVMPPVDNFAFALLGWTGSRQFERDLRRFARHERKMLLDRHALYDRTKKIFLPAKSEEDIFAHLGLDYIPPWQRNA

SEQ ID NO: 633 - protein, 362 aa, Artificial Sequence
  Modified TdT Sequence
MENLYFQGTVSQYACQRRTTMENHNKIFTDAFAILAENAEFNESEGPCLAFRRAASLLKSLPHAISSSKDLEGLPCLGDQTKAVIEDILEYGQCSKVQDVLCDDRYQTIKLFTSVFGVGLKTAEKWYRKGFHSLEEVQADKAIHFTKMQKAGFLYYDDISAAVCKAEADAIGQIVEETVRLIAPDAIVTLTGGFRRGKEIGHDVDFLITTPEAGKEQLLPRVINLLEKKGLLLYYDLVESTFDKTRLPCRKFEAMDHFQKCFAIIKLKKELAAGRVQKDWKAIRVDFVMPPVDNFAFALLGWTGSRQFERDLRRFARHERKMLLDRHALYDKTKKIFLPAKTEEEIFAHLGLDYIPPWQRNA

SEQ ID NO: 634 - protein, 362 aa, Artificial Sequence
  Modified TdT Sequence
MENLYFQGTVSQYACQRRTTMENHNQIFTDAFAILAENAEFNESEGPALAFRRAASLLKSLPHAISSSKDLEGLPCLGDQTKAVIEDIFEYGQCSKVQDVLCDDRYQTIKLFTSVFGVGLKTAEKWYRKGFHSLEEVQADKAIHFTKMQKAGFLYYDDISAAVCKAEADAIGQIVEETVRLIAPDAIVTLTGGFRRGKECGHDVDFLITTPEMGKEQLLPRVINLLEKKGLLLYYDLVESTFDKTRLPCRKFEAMDHFQKCFAIIKLKKELAAGRVQKDWKAIRVDFVMPPVDNFAFALLGWTGSRQFERDLRRFARHERKMLLDRHALYDKTKKIFLPAKTEEDIFAHLGLDYIDPWQRNA

SEQ ID NO: 635 - protein, 362 aa, Artificial Sequence
  Modified TdT Sequence
MENLYFQGTVSQYACQRRTTMENHNQIFTDAFAILAENAEFNESEGPCLAFRRAASLLKSLPHAISSSKDLEGLPCLGDQTKAVIEDILEYGQCSKVQDVLCDDRYQTIKLFTSVFGVGLKTAEKWYRKGFHSLEEVQADKAIQFTKMQKAGFLYYDDISAAVCKAEADAIGQIVEETVRLITPDAIVTLTGGFRRGKECGHDVDFLITTPEMGKEQLLPRVINLWEKKGLLLYYDLVESTFDKTRLPCRKFEAMDHFQKCFAIIKLKKELAAGRVQKDWKAIRVDFVMPPVDNFAFALLGWTGSRQFERDLRRFARHERKMLLDRHALYDKTKKIFLPAKTEEDIFAHLGLDYIPPWQRNA

SEQ ID NO: 636 - protein, 362 aa, Artificial Sequence
  Modified TdT Sequence
MENLYFQGTVSQYACQRRTTMENHNQIFTDAFAILAENAEFNESEGPCLAFRRAASLLKSLPHAISSSKDLEGLPCLGDQTKAVIEDILEYGQCSKVQDVLCDDRYQTIKLFTSVFGVGLKTAEKWYRMGFHSLEEVQADKAIHFTKMQKAGFLYYDDISAAVCKAEADAIGQIVEETVRLIAPDAIVTLTGGFRRGKEIGHDVDFLITTPEMGKEQLLPKVIDLLEKKGLLLYYDLVESTFDKTRLPCRKFEAMDHFQKCFAIIKLKKELAAGRVQKDWKAIRVDFVMPPVDNFAFALLGWTGSRQFERDLRRFARHERKMLLDRHALYDKTKKIFLPAKTEEDIFAHLGLDYIPPWQRNA

SEQ ID NO: 637 - protein, 362 aa, Artificial Sequence
  Modified TdT Sequence
MENLYFQGTVSQYACQRRTTMENHNQIFTDAFAILAENAEFNESEGPAVAFRRAASLLKSLPHAISSSKDLEGLPCLGDQTKAVIEDILEYGQCSKVQDVLCDDRYQTIKLFTSVFGVGLKTAEKWYRKGFHSLEEVQADKAIQFTKMQKAGFLYYDDISAAVCKAEADAIGQIVEETVRLIAPDAIVTLTGGFRRGKEIGHDVDFLITTPEMGKEQLLPKVINLLEKKGLLLYYDLIESTFDKTRLPCRKFEAMDHFQKCFAIIKLKKELAAGRVQKDWKAIRVDFVMPPIDNFAFALLGWTGSRQFERDLRRFARHERKMLLDRHALYDKTKKIFLPAKTEEDIFAHLGLDYIPPWQRNA

SEQ ID NO: 638 - protein, 362 aa, Artificial Sequence
  Modified TdT Sequence
MENLYFQGTVSQYACQRRTTMENRNQIFTDAFAILAENAEFNESEGPALAFRRAASLLKSLPHAISSSKDLEGLPCLGDQTKAVIEDILEYGQCSKVQDVLCDDRYQTIKLFTSVFGVGLKTAEKWYRKGFHSLEEVQADKAIQFTKMQKAGFLYYDDISAAVCKAEADAIGQIVEETVRLIAPDAIVTLTGGFRRGKECGHDVDFLITTPEQGKEQLLPDVINLLEKKGLLLYYDLVESTFDKTRLPCRKFEAMDHFQKCFAIIKLKKERAAGRVQKDWKAIRVDFVMPPIDNFAFALLGWTGSRQFERDLRRFARHERKMLLDRHALYDKTKKIFLPAKTEEDIFAHLGLDYIPPWQRNA

SEQ ID NO: 639 - protein, 362 aa, Artificial Sequence
  Modified TdT Sequence
MENLYFQGTVSQYACQRRTTMENHNQIFTDAFAILAENAEFNESEGPALAFRRAASLLKSLPHAISSSKDLEGLPCLGDQTKAVIEDILEYGQCSKVQDVLCDDRYQTIKLFTSVFGVGLKTAEKWYRKGFHSLEEVQADKAIQFTKMQKAGFLYYDDISAAVCKAEADAIGQVVEETVRLIAPDAIVTLTGGFRRGKEIGHDVDFLITTPEMGKEQLLPKVINLLEKKGLLLYYELVESTFDKARLPCRKFEAMDHFQKCFAIIKLKKELAAGRVQKDWKAIRVDFVMPPVDNFAFALLGWTGSRQFERDLRRFARHERKMLLDRHALYDKTKKIFLPAKTEEDIFAHLGLDYIPPWQRNA

SEQ ID NO: 640 - protein, 362 aa, Artificial Sequence
  Modified TdT Sequence
MENLYFQGTVSQYACQRRTTMENHNKIFTDAFAILAENAEFNESEGPCLAFRRAASLLKSLPHAISSSKDLEGLPCLGDQTKAVIEDILEYGQCSKVQDVLCDDRYQTIKLFTSVFGVGLKTAEKWYRKGFHSLEEVQADKAIHFTKMQKAGFLYYDDISAAVCKAEADAIGQIVEETVRLIAPDAIVTLTGGFRRGKEIGHDVDFLITTPEMGKEQLLPRVINLLEKKGLLLFYDLVESTFDKTRLPCRKFEAMDHFQKCFAIIKLKKELAAGRVQKDWKAIRVDFVMPPVDNFAFALLGWTGSRQFERDLRRFARHERKMLLDRHALYDRTKKIFLPAKTEEDIFAHLGLDYIPPWQRNA

SEQ ID NO: 641 - protein, 362 aa, Artificial Sequence
  Modified TdT Sequence
MENLYFQGTVSQYACQRRTTLENHNQIFTDAFAILAENAEFNESEGPALAFRRAASLLKSLPHAISSSKDLEGLPCLGDQTKAVIEDILEYGQCSKVQDVLCDDRYQTIKLFTSVFGVGLKTAEKWYRKGFHSLEEVQADKAIQFTKMQKAGFLYYDDISAAVCKAEADAIGQIVEETVHLIAPDAIVTLTGGFRRGKECGHDVDFLITTPEMGKEQLLPDVINLLEKKGLLLYYDLVESTFDKTRLPCRKFEAMDHFQKCFAIIKLKKELAAGCVQKDWKAIRVDFVMPPIDNFAFALLGWTGSRQFERDLRRFARHERKMLLDRHALYDKTKKIFLPAKTEEDIFAHLGLDYIPPWQRNA

SEQ ID NO: 642 - protein, 362 aa, Artificial Sequence
  Modified TdT Sequence
MENLYFQGTVSQYACQRRTTMENHNQIFTDAFAILAENAEFNESEGPCLAFRRAASLLKSLPHAISSSKDLQGLPCLGDQTKAVIEDIIEYGQCSKVQDVLCDDRYQTIKLFTSVFGVGLKTAEKWYRKGFHSLEEVQADKAIHFTKMQKAGFLYYDDISAAVCKAEADAIGQIVEETVRLIAPDAIVTLTGGFRRGKECGHDVDFLITTPEMGKEQLLPKVVNLWEKKGLLLYYDLVESTFDKTRLPCRKFEAMDHFQKCFAIIKLKKELAAGRVQKDWKAIRVDFVMPPVDNFAFALLGWTGSRQFERDLRRFARHERKMLLDRHALYDKTKKIFLPAKTEEDIFAHLGLDYIPPWQRNA

SEQ ID NO: 643 - protein, 362 aa, Artificial Sequence
  Modified TdT Sequence
MENLYFQGTVSQYACQRRTTMENHNQIFTDAFAILAENAEFNESEGPALAFRRAASLLKSLPHAISSSKDLEGLPCLGDQTKAVIEDILEYGQCSKVQDVLCDDRYQTIKLFTSVFGVGLKTAEKWYRKGFHSLEEVQADKAIQFTKMQKAGFLYYDDISAAVCKAEADAIGQIVEETVRLIAPDAIVTLTGGFRRGKECGHDVDFLITTPEMGKEQLLPDVINLLEKKGLLLYYDLIESTFDKTRLPCRKFEAMDHFQKCFAIIKLKKERAAGRVQKDWKAIRVDFVMPPADNFAFALLGWTGSRQFERDLRRFARHERKMLLDRHALYDKTKKIFLPAKTEEDIFAHLGLDYIPPWQRNA

SEQ ID NO: 644 - protein, 362 aa, Artificial Sequence
  Modified TdT Sequence
MENLYFQGTVSQYACQRRTTMENHNQIFTDAFAILAENAEFNENEGPALAFRRAASLLKSLPHAISSSKDLEGLPCLGDQTKAVIEDILEYGQCSKVQDVLCDDRYQTIKLFTSVFGVGLKTAEKWYRMGFHSLEEVQADKAIQFTKMQKAGFLYYDDISAAVCKAEADAIGQIVEETVRLIAPDAIVTLTGGFRRGKEIGHDVDFLITTPEMGKEQLLPKVINLLEKKGLLLFYDLVESTFDKTRLPCRKFEAMDHFQKCFAIIKLKKERAAGRVQKDWKAIRVDFVMPPVDNFAFALLGWTGSRQFERDLRRFARHERKMLLDRHALYDKTKKIFLPAKTEEDIFAHLGLDYIPPWQRNA

SEQ ID NO: 645 - protein, 362 aa, Artificial Sequence
  Modified TdT Sequence
MENLYFQGTVSQYACQRRTTMENHNQIFTDAFAILAENAEFNESEGPCLAFLRAASLLKSLPHAISSSKDLEGLPCLGDQTKAVIEDILEYGQCSKVQDVLCDDRYQTIKLFTSVFGVGLKTAEKWYRKGFHSLEEVQADKAIHFTKMQKAGFLYYDDISAAVCKAEADAIGQIVEETVRLIAPDAIVTLTGGFRRGKEIGHDVDFLITTPEMGKEQLLPRVINLLEKKGLLLYYDLVESTFDKTRLPCRKFEAMDHFQKCFAIIKLKKELADGRVQKDWKAIRVDFVMPPVDNFAFALLGWTGSRQFERDLRRFARHERKMLLDRHALYDKTKKIFLPAKSEEDIFAHLGLDYIPPWQRNA

SEQ ID NO: 646 - protein, 362 aa, Artificial Sequence
  Modified TdT Sequence
MENLYFQGTVSQYACQRRTTMENHNQIFTDAFAILAENAEFNESEGPALAFRRAASLLKSLPHAISSSKDLEGLPCLGDQTKAVIEDILEYGQCSKVQDVLCDDRYQTIKLFTSVFGVGLKTAEKWYRMGFHSLEEVQADKAIQFTKMQKAGFLYYDDISAAVCKAEADAIGQVVEETVRLIAPDAIVTLTGGFRRGKEIGHDVDFLITTPEAGKEQLLPKVINLLEKKGLLLYYDLVESTFDKTRLPCRKFEAMDHFQKCFAIIKLKKELAAGRVQKDWKAIRVDFVMPPVDNFAFALLGWTGSRQFERDLRRFARHERKMLLDRHALYDKTKKIFLPAKTEEDIFAHLGLDYIPPWQRNA

SEQ ID NO: 647 - protein, 362 aa, Artificial Sequence
  Modified TdT Sequence
MENLYFQGTVSQYACQRRTTMENHNQIFTDAFAILAENAEFNESEGPCLAFRRAASLLKSLPHAISSSKDLEGLPCLGDQSKAVIEDILEYGQCSKVQDVLCDDRYQTIKLFTSVFGVGLKTAEKWYRKGFHSLEEVQADKAIHFTKMQKAGFLYYDDISAAVCKAEADAIGQIVEETVRLIAPDAIVTLTGGFRRGKECGHDVDFLITTPGMGKEQLLPKVIRLWEKKGLLLYYDLVESTFDKTRLPCRKFEAMDHFQKCFAIIKLKKELAAGRVQKDWKAIRVDFVMPPVDNFAFALLGWTGSRQFERDLRRFARHERKMLLDRHALYDKTKKIFLPAKTEEDIFAHLGLDYIPPWQRNA

SEQ ID NO: 648 - protein, 362 aa, Artificial Sequence
  Modified TdT Sequence
MENLYFQGTVSQYACQRRTTMENHNQIFTDAFAILAENAEFNESEGPALAFRRAASLLKSLPHAISSSKDLEGLPCLGDQTKAVIEDILEYGQCSKVQDVLCDDRYQTIKLFTSVFGVGLKTAEKWYRKGFHSLEEVQADKAIHFTKMQKAGFLYYDDISAAVCKAEADAIGQIVEETVRLIAPDAIVTLTGGFRRGKECGHDVDFLITTPEMGKEQLLPDVINLLEKKGLLLYYDLIESTFDKTRLPCRKFEAMDHFQKCFAIIKLEKELAAGRVQKDWKAIRVDFVMPPIDNFAFALLGWTGSRQFERDLRRFARHERKMLLDRHALYDKTKKIFLPAKTEEDIFAHLGLDYIPPWQRNA

SEQ ID NO: 649 - protein, 362 aa, Artificial Sequence
  Modified TdT Sequence
MENLYFQGTVSQYACQRRTTMENHNQIFTDAFAILAENAEFNESEGPALAFRRAASLLKSLPHTISSSKDLEGLPCLGDQTKAVIEDILEYGQCSKVQDVLCDDRYQTIKLFTSVFGVGLKTAEKWYRKGFHSLEEVQADKAIQFTKMQKAGFLYYDDISAAVCKAEADAIGQIVEETVRLIAPDALVTLTGGFRRGKECGHDVDFLITTPEMGKEQLLPDVINLLEKKGLLLYYDLVESTFDKTRLPSRKFEAMDHFQKCFAIIKLKKELAAGRVQKDWKAIRVDFVMPPIDNFAFALLGWTGSRQFERDLRRFARHERKMLLDRHALFDKTKKIFLPAKTEEDIFAHLGLDYIPPWQRNA

SEQ ID NO: 650 - protein, 362 aa, Artificial Sequence
  Modified TdT Sequence
MENLYFQGTVSQYACQRRTTMENHNQIFTDAFAILAENAEFNESEGPCLAFRRAASLLKSLPHAISSSKDLEGLPCLGDRSKAVIEDILECGQCSKVQDVLCDDRYQTIKLFTSVFGVGLKTAEKWYRKGFHSLEEVQADKAIHFTKMQKAGFLYYDDISAAVCKAEADAIGQIVEETVRLIAPDAIVTLTGGFRRGKECGHDVDFLITTPEMGKEQLLPKVINLWEKKGLLLYYDLVESTFDKTRLPCRKFEAMDHFQKCFAIIKLKKELAAGRVQKDWKAIRVDFVMPPVDNFAFALLGWTGSRQFERDLRRFARHERKMLLDRHALYDKTKKIFLPAKTEEDIFAHLGLDYIPPWQRNA

SEQ ID NO: 651 - protein, 362 aa, Artificial Sequence
  Modified TdT Sequence
MENLYFQGTVSQYACQRRTTMENHNQIFTDAFAILAENAEFNENEGPALAFRRAASLLKSLPHAISSSKDLEGLPCLGDQTKAVIEDILEYGQCSKVQDVLCDDRYQTIKLFTSVFGVGLKTAEKWYRKGFHTLEEVQADKAIQFTKMQKAGFLYYDDISAAVCKAEADAIGQIVEETVRLIAPDAIVTLTGGFRRGKECGHDVDFLITTPEMGKEQLLPKVINLLEKKGLLLYYDLVESTFDKTRLPCRKFEAMDHFQKCFAIIKLKKELAAGRVQKDWKAIRVDFVMPPVDNFAFALLGWTGSRQFERDLRRFARHERKMLLDRHALYDKTKKIFLPAKTEEDIFAHLGLDYIPPWQRNA

SEQ ID NO: 652 - protein, 362 aa, Artificial Sequence; identical to SEQ ID NO: 352
  Modified TdT Sequence

SEQ ID NO: 653 - protein, 362 aa, Artificial Sequence
  Modified TdT Sequence
MENLYFQGTVSQYACQRRTTMENHNQIFTDAFAILAENAEFNENEGPCLAFRRAASLLKSLPHAISSSKDLEGLPCLGDQSKAVIEDILEYGQCSKVQDVLCDDRYQTIKLFTSVFGVGLKTAEKWYRKGFHSLEEVQADKAIHFTKMQKAGFLYYDDISAAVCKAEADAIGQIVEETVRLIAPDAIVTLTGGFRRGKNCGHDVDFLITTPEMGKEQLLPKVINLWEKKGLLLYYDLVESTFDKTRLPCRKFEAMDHFQKCFAIIKLKKELAAGRVQKDWKAIRVDFVMPPVDNFAFALLGWTGSRQFERDLRRFARHERKMLLDRHALYDKTKKIFLPAKTEEDIFAHLGLDYIPPWQRNA

SEQ ID NO: 654 - protein, 362 aa, Artificial Sequence
  Modified TdT Sequence
MENLYFQGTVSQYACQRRTTMENHNQIFTDAFAILAENAEFNESEGPALAFRRAASLLKSLPHAISSSKDLEGLPCLGDQTKAVIEDILEYGQCSKVQDVLCDDRYQTIKLFTSVFGVGLKTAEKWYRKGFHSLEEVQADKAIQFTKMQKAGFLYYDDISAAVCKAEADAIGQIVEETVRAIAPDALVTLTGGFRRGKSCGHDVDFLITTPEMGKEQLLPKVINLLEKKGLLLYYDLVESTFDKTRLPCRKFEAMDHFQKCFAIIKLKKELAAGRVQKDWKAIRVDFVMPPIDNFAFALLGWTGSRQFERDLRRFARHERKMLLDRHALYDKTKKIFLPAKTEEDIFAHLGLDYIPPWQRNA

SEQ ID NO: 655 - protein, 362 aa, Artificial Sequence
  Modified TdT Sequence
MENLYFQGTVSQYACQRRTTMENHNQIFTDAFAILAENAEFNESEGPALAFRRAASLLKSLPHAISSSKDLEGLPCLGDQTKAVIEDILEYGQCSKVQDVLCDDRYQTIKLFTSVFGVGPKTAEKWYRKGFHSLEEVQADKAIHFTKMQKAGFLYYDDISAAVCKAEADAIGQIVEETVRLIAPDAIVTLTGGFRRGKEIGHDVDFLITTPEMGKEQLLPRVINLLEQKGLLLYYDLVESTFDKTRLPCRKFEAMDHFQKCFAIIKLKKELAAGRVQKDWKAIRVDFVMPPVDNFAFALLGWTGSRQFERDLRRFARHERKMLLDRHALYDKTKKIFLPAKTEEDIFAHLGLDYIPPWQRNA

SEQ ID NO: 656 - protein, 362 aa, Artificial Sequence
  Modified TdT Sequence
MENLYFQGTVSQYACQRRTTMENHNQIFTDAFAILAENAEFNENEGPCLAFRRAASLLKSLPHAISSSKDLEGLPCLGDQTKAVIEDILEYGQCSKVQDVLCDDRYQTIKLFTSVFGVGLKTAEKWYRKGFHSLEEVQADKAIHFTKMQKAGFLYYDDISAAVCKAEADAIGQIVEETVRLIAPDAIVALTGGFRRGKEIGHDVDFLITTPEMGKEQLLPRVINLLEKKGLLLYYDLVESTFDKTRLPCRKFEAMDHFQKCFAIIKLKKELADGRVQKDWKAIRVDFVMPPVDNFAFALLGWTGSRQFERDLRRFARHERKMLLDRHALYDKTKKIFLPAKTEEEIFAHLGLDYIPPWQRNA

SEQ ID NO: 657 - protein, 362 aa, Artificial Sequence
  Modified TdT Sequence
MENLYFQGTVSQYACQRRTTMENHNQIFTDAFAILAENAEFNESEGPALAFRRAASLLKSLPHAISSSKDLEGLPCLGDQTKAVIEDILEYGQCSKVQDVLCDDRYKTIKLFTSVFGVGLKTAEKWYRKGFHSLEEVQADKAIQFTKMQKAGFLYYDDISAAVCKAEADAIGQIVEETVRLIAPDAIVTLTGGFRRGKECGHDVDFIITTPEQGKEQLLPDVINLLEKKGLLLYYDLVESTFDKTRLPCRKFEAMDHFQKCFAIIKLKKELAAGRVQKDWKAIRVDFVMPPIDNFAFALLGWTGSRQFERDLRRFARHERKMLLDRHALYDKTKKIFLPAKTEEDIFAHLGLDYIPPWQRNA

SEQ ID NO: 658 - protein, 362 aa, Artificial Sequence
  Modified TdT Sequence
MENLYFQGTVSQYACQRRTTMENHNQIFTDAFAILAENAEFNESEGPSLAFRRAASLLKSLPHAISSSKDLEGLPCLGDQTKAVIEDILEYGQCSKVQDVLCDDRYKTIKLFTSVFGVGLKTAEKWYRKGFHSLEEVQADKAIQFTKMQKAGFLYYDDISAAVCKAEADAIGQIVEETVRLIAPDAIVTLTGGFRRGKEIGHDVDFLITTPEAGKEQLLPKVINLLEKKGLLLYYDLVESTFDKTRLPCRKFEAMDHFQKCFAIIKLKKELAAGRVQKDWKAIRVDFVMPPVDNFAFALLGWTGSRQFERDLRRFARHERKMLLDRHALYDKTKKIFLPAKTEEDIFAHLGLDYIPPWQRNA

SEQ ID NO: 659 - protein, 362 aa, Artificial Sequence
  Modified TdT Sequence
MENLYFQGTVSQYACQRRTTMENHNQIFTDAFAILAENAEFNESEGPCLAFRRAASLLKSLPHAISSSKDLEGLPCLGDQTKAVIEDILEYGQCSKVQDVLCDDRYQTIKLFTSVFGVGLKTAEKWYRKGFHSLEEVQADKAIHFTKMQKAGFLYYDDITAAVCKAEADAIGQIVEETVRLIAPDAIVTLTGGFRRGKEIGHDVDFLITTPEAGKEQLLPRVIDLLEKKGLLLYYDLVESTFDKTRLPCRKFEAMDHFQKCFAIIKLKKELAAGRVQKDWKAIRVDFVMPPVDNFAFALLGWTGSRQFERDLRRFARHERKMLLDRHALYDKTKKIFLPAKTEEDIFAHLGLDYIPPWQRNA

SEQ ID NO: 660 - protein, 362 aa, Artificial Sequence
  Modified TdT Sequence
MENLYFQGTVSQYACQRRTTMENHNQIFTDAFAILAENAEFNESEGPALAFRRAASLLKSLPHAISSSKDLEGLPCLGDQTKAVIEDILEYGQCSKVQDVLCDDRYQTIKLFTSVFGVGLKTAEKWYRKGFHTLEEVQADKAIQFTKMQKAGFLYYDDISAAVCKAEADAIGQIVEETVRLIAPDAIVTLTGGFRRGKEIGHDVDFLITTPEAGKEQLLPKVINLLEKKGLLLYYDLVESTFDKTRLPCRKFEAMDHFQKCFAIIKLKKELAAGRVQKDWKAIRVDFVMPPVDNFAFALLGWTGSRQFERDLRRFARHERKMLLDRHALYDKTKKIFLPAKTEEDIFAHLGLEYIPPWQRNA

SEQ ID NO: 661 - protein, 362 aa, Artificial Sequence
  Modified TdT Sequence
MENLYFQGTVSQYACQRRTTMENHNQLFTDAFAILAENAEFNESEGPALAFRRAASLLKSLPHAISSSKDLEGLPCLGDQTKAVIEDILEYGQCSKVQDVLCDDRYQTIKLFTSVFGVGLKTAEKWYRKGFHSLEEVQADKAIQFTKMQKAGFLYYDDISAAVCKAEADAIGQIVEETVRLIAPDALVTLTGGFRRGKECGHDVDFLITTPEMGKEQLLPDLINLLEKKGLLLYYDLVESTFDKTRLPCRKFEAMDHFQKCFAIIKLKKELAAGRVQKDWKAIRVDFVMPPIDNFAFALLGWTGSRQFERDLRRFARHERKMLLDRHALYDKTKKIFLPAKTEEDIFAHLGLDYIPPWQRNA

SEQ ID NO: 662 - protein, 362 aa, Artificial Sequence
  Modified TdT Sequence
MENLYFQGTVSQYACQRRTTMENHNQIFTDAFAILAENAEFNENEGPALAFRRAASLLKSLPHAISSSKDLEGLPCLGDQTKAVIEDILEYGQCSKVQDVLCDDRYQTIKLFTSVFGVGLKTAEKWYRMGFHSLEEVQADKAIQFTKMQKAGFLYYDDISAAVCKAEADAIGQIVEETVRLIAPDAIVTLTGGFRRGKEIGHDVDFLITTPEMGKEQLLPKVINLLEKKGLLLYYDLVESTFDKTRLPCRKFEAMDHFQKCFAIIKLKKELADGRVQKDWKAIRVDFVMPPIDNFAFALLGWTGSRQFERDLRRFARHERKMLLDRHALYDKTKKIFLPAKTEEDIFAHLGLDYIPPWQRNA

SEQ ID NO: 663 - protein, 362 aa, Artificial Sequence
  Modified TdT Sequence
MENLYFQGTVSQYACQRRTTMENHNQIFTDAFAILAENAEFNESEGPCLAFRRAASLLKSLPHAISSSKDLEGLPCLGDQTKAVIEDILEYGQCSKVQDVLCDDRYQTIKLFTSVFGVGLKTAEKWYRKGFHSLEEVQADKAIQFTKMQKAGFLYYDDISAAVCKAEADAIGQIVEETVRLIAPDAIVTLTGGFRRGKEIGHDVDFLITTPEMGKEQLLPRVIDLLEKKGLLLYYDLVESTFDKTRLPCRKFEAMDHFQKCFAIIKLKKELAAGRVQKDWKAIRVDFVMPPVDNFAFALLGWTGSRQFERDLRRFARHERKMLLDRHALYDRTKKIFLPAKTEEDIFAHLGLDYIPPWQRNA

SEQ ID NO: 664 - protein, 362 aa, Artificial Sequence
  Modified TdT Sequence
MENLYFQGTVSQYACQRRTTMENHNQIFTDAFAILAENAEFNESEGPALAFRRAASLLKSLPHAISSSKDLEGLPCLGDQTKAVIEDILEYGQCSKVQDVLCDDRYQTIKLFTSVFGVGLKTAEKWYRKGFHSLEEVQADKAIQFTKMQKAGFLYYDDISAAVCKAEADAIGQIVEETVRLIAPDAIVTLTGGFRRGKECGHDVDFLITTPEMGKEQLLPDLINLLEKKGLLLYYHLVESTFDKTRLPCRKFEAMDHFQKCFAIIKLKKELAAGRVQKDWKAIRVDFVMPPIDNFAFALLGWTGSRQFERDLRRFARHERKMLLDRHALFDKTKKIFLPAKTEEDIFAHLGLDYIPPWQRNA

SEQ ID NO: 665 - protein, 362 aa, Artificial Sequence
  Modified TdT Sequence
MENLYFQGTVSQYACQRRTTLENHNQIFTDAFAILAENAEFNESEGPALAFRRAASLLKSLPHAISSSKDLEGLPCLGDQTKAVIEDILEYGQCSKVQDVLCDDRYQTIKLFTSVFGVGLKTAEKWYRKGFHSLEEVQADKAIQFTKMQKAGFLYYDDISAAVCKAEADAIGQIVEETVRLIAPDAIVTLTGGFRRGKECGHDVDFLITTPEKGKEQLLPDVINLLEKKGLLLYYDLVESTFDKTRLPCRKFEAMDHFQKCFAIIKLKKELAAGRVQKDWKAIRVDFVMPPIDNFAFALLGWTGSRQFERDLRRFARHERKMLLDRHALYDKTKKIFLPAKTEEDIFAHLGLEYIPPWQRNA

SEQ ID NO: 666 - protein, 362 aa, Artificial Sequence
  Modified TdT Sequence
MENLYFQGTVSQYACQRRTTMENHNQIFTDAFAILAENAEFNESEGPALAFRRAASLLKSLPHAISSSKDLEGLPCLGDQTKAVIEDILEYGQCSKVQDVLCDDRYQTIKLFTSVFGVGLKTAEKWYRKGFHSLEEVQADRAIQFTKMQKAGFLYYDDISAAVCKAEADAIGQIVEETVRLIAPDALVTLTGGFRRGKECGHDVDFIITTPEMGKEQLLPDVINLLEKKGLLLYYDLVESTFDKTRLPCRKFEAMDHFQKCFAIIKLKKELAAGRVQKDWKAIRVDFVMPPIDNFAFALLGWTGSRQFERDLRRFARHERKMLLDRHALYDKTKKIFLPAKTEEDIFAHLGLDYIPPWQRNA

SEQ ID NO: 667 - protein, 362 aa, Artificial Sequence
  Modified TdT Sequence
MENLYFQGTVSQYACQRRTTMENHNQIFTDAFAILAENAEFNESEGPALAFRRAASLLKSLPHAISSSKDLEGLPCLGDQTKAVIEDILEYGQCSKVQDVLCDDRYQTIKLFTSVFGVGLKTAEKWYRKGFHSLEEVQADKAIQFTKMQKAGFLYYDDISAAVCKAEADAIGQIVEETVRLIAPDALVTLTGGFRRGKECGHDVDFLITTPEMGKEQLLPDVINLLEKKGLLLYYDLIESTFDKTRLPCRRFEAMDHFQKCFAIIKLKKELAAGRVQKDWKAIRVDFVMPPIDNFAFALLGWTGSRQFERDLRRFARHERKMLLDRHALYDKTKKIFLPAKTEEDIFAHLGLDYIPPWQRNA

SEQ ID NO: 668 - protein, 362 aa, Artificial Sequence
  Modified TdT Sequence
MENLYFQGTVSQYACQRRTTMENHNQIFTDAFAILAENAEFNESEGPCLAFRRAASLLKSLPHAISSSKDLEGLPCLGDQTKAVIEDILEYGQCSKVQDVLCDDRYQTIKLFTSVFGVGLKTAEKWYRKGFHSLEEVQADKAIHFTKMQKAGFLYYDDISAAVCKAEADAIGQIVEETVRLIAPDAIVTLTGGFRRGKECGHDVDFLITTPEMGKEQLLPKVVNLWEKKGLLLYYDLVESTFDKTRLPCRKFEAMDHFQKCFAIIKLKKELAAGRVQKDWKAIRVDFVMPPVDCFAFALLGWTGSRQFERDLRRFARHERKMLLDRHALYDRTKKIFLPAKTEEDIFAHLGLDYIPPWQRNA

SEQ ID NO: 669 - protein, 362 aa, Artificial Sequence
  Modified TdT Sequence
MENLYFQGTVSQYACQRRTTMENHNQIFTDAFAILAENAEFNENEGPCLAFRRAASLLKSLPHAISSSKDLEGLPCLGDQTKAVIEDIFEYGQCSKVQDVLCDDRYQTIKLFTSVFGVGLKTAEKWYRKGFHSLEEVQADKAIHFTKMQKAGFLYYDDISAAVCKAEADAIGQVVEETVRLIAPDAIVTLTGGFRRGKEIGHDVDFLITTPEMGKEQLLPRVINLLEKKGLLLYYDLVESTFDKTRLPCRKFEAMDHFQKCFAIIKLKKELAAGRVQKDWKAIRVDFVMPPVDNFAFALLGWTGSRQFERDLRRFARHERKMLLDRHALYDKTKKIFLPAKTEEDIFAHLGLDYIPPWQRNA

SEQ ID NO: 670 - protein, 362 aa, Artificial Sequence
  Modified TdT Sequence
MENLYFQGTVSQYACQRRTTMENHNQIFTDAFAILAENAEFNESEGPALAFRRAASLLKSLPHAISSSKDLEGLPCLGDQTKAVIEEILEYGQCSKVQDVLCDDRYQTIKLFTSVFGVGLKTAEKWYRKGFHSLEEVQADKAIQFTKMQKAGFLYYDDISAAVCKAEADAIGQIVEETVRAIAPDAIVTLTGGFRRGKECGHDVDFIITTPEMGKEQLLPDVINLLEKKGLLLYYDLVESTFDKTRLPCRKFEAMDHFQKCFAIIKLKKELAAGRVQKDWKAIRVDFVMPPIDNFAFALLGWTGSRQFERDLRRFARHERKMLLDRHALYDKTKKIFLPAKTEEDIFAHLGLDYIPPWQRNA

SEQ ID NO: 671 - protein, 362 aa, Artificial Sequence
  Modified TdT Sequence
MENLYFQGTVSQYACQRRTTMENHNQIFTDAFAILAENAEFNESEGPCLAFRRAASLLKSLPHAISSSKDLEGLPCLGDQTKAVIEDILEYGQCSKVQDVLCDDRYQTIKLFTSVFGVGLKTAEKWYRKGFHSLEEVQADKAIHFTKMQKAGFLYYDDISAAVCKAEADAIGQIVEETVRLIAPDAIVTLTGGFRRGKEIGHDVDFLITTPEMGKEQLLPKVINLWEKKGLLLYYDLVESTFDKTRLPCRKFEAMDHFQKCFAIIKLKKELADGRVQKDWKAIRVDFVMPPVDNFAFALLGWTGSRQFERDLRRFARHERKMLLDRHALYDKTKKIFLPAKTEEDIFAHLGLDYIPPWQRNA

SEQ ID NO: 672 - protein, 362 aa, Artificial Sequence
  Modified TdT Sequence
MENLYFQGTVSQYACQRRTTMENHNQIFTDAFAILAENAEFNESEGPCLAFRRAASLLKSLPHAISSSKDLEGLPCLGDQTKAVIEDILEYGQCSKVQDVLCDDRYQTIKLFTSVFGVGLKTAEKWYRKGFHSLEEVQADKAIHFTKMQKAGFLYYDDISAAVCKAEADAIGQIVEETVRLIAPDAIVTLTGGFRRGKECGHDVDFLITTPEAGKEQLLPKVINLWEKKGLLLYYDLVESTFDKSRLPCRKFEAMDHFQKCFAIIKLKKELAAGRVQKDWKAIRVDFVMPPVDCFAFALLGWTGSRQFERDLRRFARHERKMLLDRHALYDKTKKIFLPAKTEEDIFAHLGLDYIPPWQRNA

SEQ ID NO: 673 - protein, 362 aa, Artificial Sequence
  Modified TdT Sequence
MENLYFQGTVSQYACQRRTTMENHNQIFTDAFAILAENAEFNESEGPALAFRRAASLLKSLPHAISSSKDLEGLPCLGDQTKAVIEDILEYGQCSKVQDVLCDDRYQTIKLFTSVFGVGLKTAEKWYRKGFHSLEEVQADKAIQFTKMQKAGFLYYDDISAAVCKAEADAIGQIVEETVRKMAPDAIVTLTGGFRRGKECGHDVDFLITTPEMGKEQLLPDVINLLEKKGLLLYYDLVESTFDKTRLPCRKFEAMDHFQKCFAIIKLKKELAAGRVQKDWKAIRVDFVMPPIDNFAFALLGWTGSRQFERDLRRFARHERKMLLDRHALYDKTKRIFLPAKTEEDIFAHLGLDYIPPWQRNA

SEQ ID NO: 674 - protein, 362 aa, Artificial Sequence
  Modified TdT Sequence
MENLYFQGTVSQYACQRRTTMENHNQIFTDAFAILAENAEFNESEGPCLAFRRAASLLKSLPHAISSSKDLEGLPCLGDQTKAVIEDILEYGQCSKVQDVLCDDRYQTIKLFTSVFGVGLKTAEKWYRKGFHSLEEVQADKAIHFTKMQKAGFLYYDDISAAVCKAEADAIGQIVEETVRLIAPDAIVTLTGGFRRGKEIGHDVDFLITTPEMGKEQLLPKVINLLEKKGLLLYYDLVESTFDKTRLPCRKFEAMDHFQQCFAIIKLKQELAAGRVQKDWKAIRVDFVMPPVDNFAFALLGWTGSRQFERDLRRFARHERKMLLDRHALYDKTKKIFLPAKTEEDIFAHLGLDYIPPWQRNA

SEQ ID NO: 675 - protein, 362 aa, Artificial Sequence
  Modified TdT Sequence
MENLYFQGTVSQYACQRRTTMENHNQIFTDAFAILAENAEFNESEGPCLAFRRAASLLKSLPHAISSSKDLEGLPCLGDQTKAVIEDILEYGQCSKVQDVLCDDRYQTIKLFTSVFGVGLKTAEKWYRMGFHSLEEVQADKAIHFTKMQKAGFLYYDDISAAVCKAEADAIGQIVEETVRLIAPDAIVTLTGGFRRGKECGHDVDFLITTPEMGKEQLLPKVINLLEKKGLLLYYDLVESTFDKTRLPCRKFEAMDHFQKCFAIIKLKKELAAGRVQKDWKAIRVDFVMPPVDNYAFALLGWTGSRQFERDLRRFARHERKMLLDRHALYDKTKKIFLPAKTEEDIFAHLGLDYIPPWQRNA

SEQ ID NO: 676 - protein, 362 aa, Artificial Sequence
  Modified TdT Sequence
MENLYFQGTVSQYACQRRTTMENHNQIFTDAFAILAENAEFNESEGPCLAFRRAASLLKSLPHAIISSKDLEGLPCLGDQTKAVIEDILEYGQCSKVQDVLCDDRYQTIKLFTSVFGVGLKTAEKWYRKGFHSLEEVQADKAIHFTKMQKAGFLYYDDISAAVCKAEADAIGQIVEETVRGIAPDAIVTLTGGFRRGKECGHDVDFLITTPEMGKEQLLPKVINLWEKKGLLLYYDLVESTFDKTRLPCRKFEAMDHFQKCFAIIKLKKELAAGRVQKDWKAIRVDFVMPPVDCFAFALLGWTGSRQFERDLRRFARHERKMLLDRHALYDKTKKIFLPAKTEEDIFAHLGLDYIPPWQRNA

SEQ ID NO: 677 - protein, 362 aa, Artificial Sequence
  Modified TdT Sequence
MENLYFQGTVSQYACQRRTTMENHNQIFTDAFAILAENAEFNESEGPALAFRRAASLLKSLPHAISSSKDLEGLPCLGDQTKAVIEDILEYGQCSKVQDVLCDDRYQTIKQFTSVFGVGLKTAEKWYRKGFHSLEEVQADKAIHFTKMQKAGFLYYDDISAAVCKAEADAIGQIVEETVRLIAPDAIVTLTGGFRRGKECGHDVDFLITTPEMGKEQLLPKVINLWEKKGLLLYYDLVESTFDKTRLPCRKFEAMDHFQKCFAIIKLKKELAAGRVQKDWKAIRVDFVMPPVDNFAFALLGWTGSRQFERDLRRFARHERKMLLDRHALYDKRKKIFLPAKTEEDIFAHLGLDYIPPWQRNA

SEQ ID NO: 678 - protein, 362 aa, Artificial Sequence
  Modified TdT Sequence
MENLYFQGTVSQYACQRRTTMENHNQIFTDAFAILAENAEFNENEGPAVAFRRAASLLKSLPHAISSSKDLEGLPCLGDQTKAVIEDILEYGQCSKVQDVLCDDRYQTIKLFTSVFGVGLKTAEKWYRKGFHSLEEVQADKAIQFTKMQKAGFLYYDDISAAVCKAEADAIGQIVEETVRLIAPDAIVTLTGGFRRGKEIGHDVDFLITTPEMGKEQLLPKVINLLEKKGLLLYYDLVESTFDKTRLPCRKFEAMDHFQKCFAILKLKKELAAGRVQKDWKAIRVDFVMPPVDNFAFALLGWTGSRQFERDLRRFARHERKMLLDRHALYDKTKKIFLPAKTEEDIFAHLGLDYIPPWQRNA

SEQ ID NO: 679 - protein, 362 aa, Artificial Sequence
  Modified TdT Sequence
MENLYFQGTVSQYACQRRTTMENHNQIFTDAFAILAENAEFNESEGPALAFRRAASLLKSLPHAISSLKDLEGLPCLGDQTKAVIEDILEYGQCSKVQDVLCDDRYQTIKLFTSVFGVGLKTAEKWYRKGFHSLEEVQADKAIQFTKMQKAGFLYYDDISAAVCKAEADAIGQIVEETVRLIAPDAIVTLTGGFRRGKECGHDVDFLITTPEQGKEQLLPDVINLLEKKGLLLYYDLVESTFDKTRLPCRKFEAMDHFQKCFAIIKLNKELAAGRVQKDWKAIRVDFVMPPIDNFAFALLGWTGSRQFERDLRRFARHERKMLLDRHALYDKTKKIFLPAKTEEDIFAHLGLDYIPPWQRNA

SEQ ID NO: 680 - protein, 362 aa, Artificial Sequence
  Modified TdT Sequence
MENLYFQGTVSQYACQRRTTMENHNQIFTDAFAILAENAEFNESEGPCLAFLRAASLLKSLPHAISSSKDLEGLPCLGDQTKAVIEDILEYGQCSKVQDVLCDDRYQTIKLFTSVFGVGLKTAEKWYRKGFHSLEEVQADKAIHFTKMQKAGFLYYDDISAAVCKAEADAIGQIVEETVRLIAPDAIVTLTGGFRRGKEIGHDVDFLITTPEAGKEQLLPRVINLLEQKGLLLYYDLVESTFDKTRLPCRKFEAMDHFQKCFAIIKLKKELAAGRVQKDWKAIRVDFVMPPVDNFAFALLGWTGSRQFERDLRRFARHERKMLLDRHALYDKTKKIFLPAKTEEDIFAHLGLDYIPPWQRNA

SEQ ID NO: 681 - protein, 362 aa, Artificial Sequence
  Modified TdT Sequence
MENLYFQGTVSQYACQRRTTMENHNQIFTDAFAILAENAEFNESEGPALAFRRAASLLKSLPHAISSSKDLEGLPCLGDQTKAVIEDILEYGQCSKVQDVLCDDRYKTIKLFTSVFGVGLKTAEKWYRKGFHSLEEVQADKSIHFTKMQKAGFLYYDDISAAVCKAEADAIGQIVEETVRLIAPDAIVTLTGGFRRGKECGHDVDFLITTPEMGKEQLLPDVINLLEKKGLLLYYDLVESTFDKTRLPCRKFEAMDHFQKCFAIIKLKKELAAGRVQKDWKAIRVDFVMPPIDNFAFTLLGWTGSRQFERDLRRFARHERKMLLDRHALYDKTKKIFLPAKTEEDIFAHLGLDYIPPWQRNA

SEQ ID NO: 682 - protein, 362 aa, Artificial Sequence
  Modified TdT Sequence
MENLYFQGTVSQYACQRRTTMENHNQIFTDAFAILAENAEFNESEGPCLAFRRAASLLKSLPHAISSSKDLEGLPCLGDQTKAVIEDILEYGQCSKVQDVLCDDRYQTIKLFTSVFGVGLKTAEKWYRKGFHSLEEVQADKAIHFTKMQKAGFLYYDDISAAVCKAEADAIGQIVEETVRLIAPDAIVTLTGGFRRGKECGHDVDFLITTPEMGKEQLLPKVINLWEKKGLLLYYDLVESTFDKTRLPCRKFEAMDHFQKCFAIIKLKKQLAAGRVQKDWKAIRVDFVLPPVDCFAFALLGWTGSRQFERDLRRFARHERKMLLDRHALYDKTKKIFLPAKTEEDIFAHLGLDYIPPWQRNA

SEQ ID NO: 683 - protein, 362 aa, Artificial Sequence
  Modified TdT Sequence
MENLYFQGTVSQYACQRRTTMENHNQIFTDAFAILAENAEFNENEGPCLAFRRAASLLKSLPHAISCSKDLEGLPCLGDQTKAVIEDILEYGQCSKVQDVLCDDRYQTIKLFTSVFGVGLKTAEKWYRKGFHSLEEVQADKAIQFTKMQKAGFLYYDDISAAVCKAEADAIGQIVEETVRLIAPDAIVTLTGGFRRGKECGHDVDFLITTPEMGKEQLLPKVINLWEKKGLLLYYDLVESTFDKTRLPCRKFEAMDHFQKCFAIIKLKKELAAGRVQKDWKAIRVDFVMPPVDNFAFALLGWTGSRQFERDLRRFARHERKMLLDRHALYDKTKKIFLPAKTEEDIFAHLGLDYIPPWQRNA

SEQ ID NO: 684 - protein, 362 aa, Artificial Sequence
  Modified TdT Sequence
MENLYFQGTVSQYACQRRTTMENHNQIFTDAFAILAENAEFNESEGPALAFRRAASLLKSLPHAISSSKDLEGLPCLGDQTKAVIEDILEYGQCSKVQDVLCDDRYQTIKLFTSVFGVGLKTAEKWYRKGFHSLEEVQADKAIQFTKMQKAGFLYYDDISAAVCKAEADAIGQIVEETVRLIAPDAIVTLTGGFRRGKECGHDVDFLITTAEQGKEQLLPKVINLLEKKGLLLYYDLVESTFDKTRLPCRKFEAMDHFQKCFAIIKLKKELAAGRVQKDWKAIRVDFVMPPADNFAFALLGWTGSRQFERDLRRFARHERKMLLDRHALYDKTKKIFLPAKTEEDIFAHLGLDYIPPWQRNA

SEQ ID NO: 685 - protein, 362 aa, Artificial Sequence
  Modified TdT Sequence
MENLYFQGTVSQYACQRRTTMENHNQIFTDAFAILAENAEFNESEGPALAFRRAASLLKSLPHAISSSKDLEGLPCLGDQTKAVIEDILEYGQCSKVQDVLCDDRYQTIKLFTSVFGVGLKTAEKWYRKGFHTLEEVQADKAIQFTKMQKAGFLYYDDISAAVCKAEADAIGQIVEETVRLIAPDAIVTLTGGFRRGKEIGHDVDFLITTPEMGKEQLLPKVINLLEQKGLLLYYELVESTFDKTRLPCRKFEAMDHFQKCWAIIKLKKELAAGRVQKDWKAIRVDFVMPPVDNFAFALLGWTGSRQFERDLRRFARHERKMLLDRHALYDKTKKIFLPAKTEEDIFAHLGLDYIPPWQRNA

SEQ ID NO: 686 - protein, 362 aa, Artificial Sequence
  Modified TdT Sequence
MENLYFQGTVSQYACQRRTTMENHNQIFTDAFAILAENAEFNESEGPCLAFLRAASLLKSLPHAISSSKDLEGLPCLGDQTKAVIEDILEYGQCSKVQDVLCDDRYQTIKLFTSVFGVGLKTAEKWYRKGFHSLEEVQADKAIHFTKMQKAGFLYYDDISAAVCKAEADAIGQIVEETVRGIAPDAIVTLTGGFRRGKEIGHDVDFLITTPEMGKEQLLPRVINLLEKKGLLLFYDLVESTFDKTRLPCRKFEAMDHFQKCFAIIKLKKELAAGRVQKDWKAIRVDFVMPPVDNFAFALLGWTGSRQFERDLRRFARHERKMLLDRHALYDKTKKIFLPAKTEEDIFAHLGLDYIPPWQRNA

SEQ ID NO: 687 - protein, 362 aa, Artificial Sequence
  Modified TdT Sequence
MENLYFQGTVSQYACQRRTTTENHNQIFTDAFAILAENAEFNESEGPALAFRRAASLLKSLPHAISSSKDLEGLPCLGDQTKAVIEDILEYGQCSKVQDVLCDDRYQTIKLFTSVFGVGLKTAEKWYRKGFHSLEEVQADKAIQFTKMQKAGFLYYDDISAAVCKAEADAIGQIVEETVRLIAPDAIVTLTGGFRRGKECGHDVDFIITTPEMGKEQLLPDVINLLEKKGLLLYYDLVESTFDKTRLPCRKFEAMDHFQKCFAIIKLKKERAAGRVQKDWKAIRVDFVMPPIDNFAFALLGWTGSRQFERDLRRFARHERKMLLDRHALYDKTKKIFLPAKTEEDIFAHLGLDYIPPWQRNA

SEQ ID NO: 688 - protein, 362 aa, Artificial Sequence
  Modified TdT Sequence
MENLYFQGTVSQYACQRRTTMENHNQIFTDAFAILAENAEFNESEGPCLAFRRAASLLKSLPHAISSSKDLEGLPCLGDQTKAVIEDILEYGQCSKVQDVLCDDRYQTIKLFTSVFGVGLKTAEKWYRKGFHSLEEVQADKAIHFTKMQKAGFLYYDDISAAVCKAEADAIGQIVEETVRLIAPDAIVTLTGGFRRGKECGHDVDFLITTPEAGKEQLLPRVINLWEQKGLLLYYDLVESTFDKTRLPCRKFEAMDHFQKCFAIIKLKKELAAGRVQKDWKAIRVDFVMPPVDNFAFALLGWTGSRQFERDLRRFARHERKMLLDRHALYDKTKKIFLPAKTEEDIFAHLGLDYIPPWQRNA

SEQ ID NO: 689 - protein, 362 aa, Artificial Sequence
  Modified TdT Sequence
MENLYFQGTVSQYACQRRTTMENHNKIFTDAFAILAENAEFNESEGPALAFRRAASLLKSLPHAISSSKDLEGLPCLGDQTKAVIEDILEYGQCSKVQDVLCDDRYQTIKLFTSVFGVGLKTAEKWYRKGFHSLEEVQADKAIHFTKMQKAGFLYYDDISAAVCKAEADAIGQIVEETVRLIAPDAIVTLTGGFRRGKEIGHDVDFLITTPEMGKEQLLPRVIDLLEKKGLLLYYDLVESTFDKTRLPCRKFEAMDHFQKCFAIIKLKKELADGRVQKDWKAIRVDFVMPPVDNFAFALLGWTGSRQFERDLRRFARHERKMLLDRHALYDKTKKIFLPAKTEEDIFAHLGLDYIPPWQRNA

SEQ ID NO: 690 - protein, 362 aa, Artificial Sequence
  Modified TdT Sequence
MENLYFQGTVSQYACQRRTTMENHNQIFTDAFAILAENAEFRESEGPAVAFRRAASLLKSLPHAISSSKDLEGLPCLGDQTKAVIEDILEYGQCSKVQDVLCDDRYQTIKLFTSVFGVGLKTAEKWYRKGFHSLEEVQADKAIQFTKMQKAGFLYYDDISAAVCKAEADAIGQIVEETVRLIAPDAIVTLTGGFRRGKEIGHDVDFLITTPEMGKEQLLPKVINLLEKKGLLLYYDLVESTFDKTRLPCRKFEAMDHFQKCFAIIKLKKEQAAGRVQKDWKAIRVDFVMPPVDNFAFALLGWTGSRQFERDLRRFARHERKMLLDRHALYDKTKKIFLPAKTEEDIFAHLGLDYIPPWQRNA

SEQ ID NO: 691 - protein, 362 aa, Artificial Sequence
  Modified TdT Sequence
MENLYFQGTVSQYACQRRTTMENHNQIFTDAFAILAENAEFNESEGPCLAFRRAASLLKSLPHAISRSKDLEGLPCLGDQTKAVIEDILEYGQCSKVQDVLCDDRYQTIKLFTSVFGVGLKTAEKWYRKGFHSLEEVQAEKAIHFTKMQKAGFLYYDDISAAVCKAEADAIGQIVEETVRLIAPDAIVTLTGGFRRGKECGHDVDFLITTPEMGKEQLLPKVINLWEQKGLLLYYDLVESTFDKTRLPCRKFEAMDHFQKCFAIIKLKKELAAGRVQKDWKAIRVDFVMPPVDNFAFALLGWTGSRQFERDLRRFARHERKMLLDRHALYDKTKKIFLPAKTEEDIFAHLGLDYIPPWQRNA

SEQ ID NO: 692 - protein, 362 aa, Artificial Sequence
  Modified TdT Sequence
MENLYFQGTVSQYACQRRTTMENHNQIFTDAFAILAENAEFNESEGPALAFRRAASLLKSLPHAISSSKDLEGLPCLGDQTKGVIEDILEYGQCSKVQDVLCDDRYQTIKLFTSVFGVGLKTAEKWYRKGFHSLEEVQADKAIQFTKMQKAGFLYYDDISAAVCKAEADAIGQIVEETVRLIAPDAIVTLTGGFRRGKECGHDVDFLITTPEMGKEQLLPKVIDLLEKKGLLLYYDLVESTFDKTRLPCRKFEAMDHFQKCFAIIKLKKELAAGRVQKDWKAIRVDFVMPPVDNFAFALLGWTGSRQFERDLRRFARHERKMLLDRHALYDKTKKIFLPAKTEEDIFAHLGLDYIPPWQRNA

SEQ ID NO: 693 - protein, 362 aa, Artificial Sequence
  Modified TdT Sequence
MENLYFQGTVSQYACQRRTTMENHNQIFTDAFAILAENAEFNESEGPCLAFRRAASLLKSLPHAISSSKDLEGLPCLGDQTKAVIEDILEYGQCSKVQDVLCDDRYQTIKLFTSVFGVGLKTAEKWYRKGFHSLEEVQADKAIHFTKMQKAGFLYYDDISAAVCKAEADAIGQIVEETVRLIAPDAIVTLTGGFRRGKECGHDVDFLITTPEMGKEQLLPRVINLLEKKGLLLYYDLVESTFDKTRLPCRKFEAMDHFQKCFAIIKLKKELADGRVQKDWKAIRVDFVMPPIDNFAFALLGWTGSRQFERDLRRFARHERKMLLDRHALYDKTKKIFLPAKTEEDIFAHLGLDYIPPWQRNA

SEQ ID NO: 694 - protein, 362 aa, Artificial Sequence
  Modified TdT Sequence
MENLYFQGTVSQYACQRRTTMENHNQIFTDAFAILAENAEFNESESPCLAFRRAASLLKSLPHAISSSKDLEGLPCLGDQTKAVIEDILEYGQCSKVQDVLCDDRYQTIKLFTSVFGVGLKTAEKWYRKGFHSLEEVQADKAIHFTKMQKAGFLYYDDISAAVCKAEADAIGQIVEETVRLIAPDAIVTLTGGFRRGKEIGHDVDFLITTPEMGKEQLLPRVINLLEKKGLLLFYDLVESTFDKTRLPCRKFEAMDHFQKCFAIIKLKQELAAGRVQKDWKAIRVDFVMPPVDNFAFALLGWTGSRQFERDLRRFARHERKMLLDRHALYDKTKKIFLPAKTEEDIFAHLGLDYIPPWQRNA

SEQ ID NO: 695 - protein, 362 aa, Artificial Sequence
  Modified TdT Sequence
MENLYFQGTVSQYACQRRTTMENHNQIFTDAFAILAENAEFNESEGPCLAFRRAASLLKSLPHAISSSKDLEGLPCLGDQTKAVIEDILEYGQCSKAQDVLCDDRYQTIKLFTSVFGVGLKTAEKWYRKGFHSLEEVQAEKAIHFSKMQKAGFLYYDDISAAVCKAEADAIGQIVEETVRLIAPDAIVTLTGGFRRGKECGHDVDFLITTPEMGKEQLLPKVINLWEKKGLLLYYDLVESTFDKTRLPCRKFEAMDHFQKCFAIIKLKKELAAGRVQKDWKAIRVDFVMPPVDNFAFALLGWTGSRQFERDLRRFARHERKMLLDRHALYDKTKKIFLPAKTEEDIFAHLGLDYIPPWQRNA

SEQ ID NO: 696 - protein, 362 aa, Artificial Sequence
  Modified TdT Sequence
MENLYFQGTVSQYACQRRTTMENHNQIFTDAFAILAENAEFNESEGPALAFRRAASLLKSLPHAISSSKDLEGLPCLGDQTKAVIEDILEYGQCSKVQDVLCDDRYQTIKLFTSVFGVGLKTAEKWYRMGFHSLEEVQADKAIHFTKMQKAGFLYYDDISAAVCKAEADAIGQIVEETVRLIAPDAIVTLTGGFRRGKEIGHDVDFLITTPEMGREQLLPRVINLLEKKGLLLYYDLVESTFDKTRLPCRKFEAMDHFQKCFAIIKLKKELAAGRVQKDWKAIRVDFVMPPVDNFAFALLGWTGSRQFERDLRRFARHERKMLLDRHALYDKTKKIFLPAKTEEDIFAHLGLDYIPPWQRNA

SEQ ID NO: 697 - protein, 362 aa, Artificial Sequence
  Modified TdT Sequence
MENLYFQGTVSQYACQRRTTMENHNQIFTDAFAILAENAEFNESEGPCLAFRRAASLLKSLPHAISSSKDLEGLPCLGDQTKAVIEDILEYGQCSKVQDVLCDDRYQTIKLFTSVFGVGLKTAEKWYRMGFHSLEEVQADKAIHFTKMQKAGFLYYDDISAAVCKAEADAIGRIVEETVRGIAPDAIVTLTGGFRRGKECGHDVDFLITTPEMGKEQLLPKVINLWEKKGLLLYYDLVESTFDKTRLPCRKFEAMDHFQKCFAIIKLKKELAAGRVQKDWKAIRVDFVMPPVDNFAFALLGWTGSRQFERDLRRFARHERKMLLDRHALYDKTKKIFLPAKTEEDIFAHLGLDYIPPWQRNA

SEQ ID NO: 698 - protein, 362 aa, Artificial Sequence
  Modified TdT Sequence
MENLYFQGTVSQYACQRRTTMENHNQLFTDAFAILAENAEFNESEGPALAFRRAASLLKSLPHAISSLKDLEGLPCLGDQTKAVIEDILEYGQCSKVQDVLCDDRYQTIKLFTSVFGVGLKTAEKWYRKGFHSLEEVQADKAIQFTKMQKAGFLYYDDISAAVCKAEADAIGQIVEETVRLIAPDAIVTLTGGFRRGKECGHDVDFLITTPEMGKEQLLPDVINLLEKKGLLLYYDLVESTFDKTRLPCRKFEAMDHFQKCFAIIKLKKELAAGCVQKDWKAIRVDFVMPPIDNFAFALLGWTGSRQFERDLRRFARHERKMLLDRHALYDKTKKIFLPAKTEEDIFAHLGLDYIPPWQRNA

SEQ ID NO: 699 - protein, 362 aa, Artificial Sequence
  Modified TdT Sequence
MENLYFQGTVSQYACQRRTTMENHNQIFTDAFAILAENAEFNESEGPALAFRRAASLLKSLPHAISSSKDLEGLPCLGDQTKAVIEDILEYGQCSKVQDVLCDDRYQTIKLFTSVFGVGLKTAEKWYRKGFHSLEEVQADKAIQFTKMQKAGFLYYDDISAAVCKAEADAIGQIVEETVRLIAPDAIVTLTGGFRRGKEIGHDVDFLITTPEMGREQLLPKVINLLEKKGLLLYYHLVESTFDKTRLPCRKFEAMDHFQKCFAIIKLKKELAAGRVQKDWKAIRVDFVMPPVDNFAFALLGWTGSRQFERDLRRFARHERKMLLDRHALYDKTKRIFLPAKTEEDIFAHLGLDYIPPWQRNA

SEQ ID NO: 700 - protein, 362 aa, Artificial Sequence
  Modified TdT Sequence
MENLYFQGTVSQYACQRRTTMENHNQIFTDAFAILAENAEFNESEGPALAFRRAASLLKSLPHAISSSKDLEGLPCLGDQTKAVIEDILEYGQCSKVQDVLCDDRYKTIKLFTSVFGVGLKTAEKWYRKGFHSLEEVQADKAIQFTKMQKAGFLYYDDISAAVCKAEADAIGQIVEETVRLIAPDAIVTLTGGFRRGKECGHDVDFLITTPEMGKEQLLPDVINLLEKKGLLLYYDLVESTFDKTRLPCRKFEAMDHFQKCFAIIKLKKELAAGRVQKDWKAIRVDFVMPPIDNFAFALLGWTGSRQFERDLRRFARHERKMLLDRHALFDKTKKIFLPAKTEEDIFAHLGLEYIPPWQRNA

SEQ ID NO: 701 - protein, 362 aa, Artificial Sequence
  Modified TdT Sequence
MENLYFQGTVSQYACQRRTTMENHNQIFTDAFAILAENAEFNESEGPCLAFRRAASLLKSLPHAISSSKDLEGLPCLGDQTKAVMEDILEYGQCSKVQDVLCDDRYQTIKLFTSVFGVGLKTAEKWYRKGFHSLEEVQADKAIHFTKMQKAGFLYYDDISAAVCKAEADAIGQIVEETVRLIAPDAIVTLTGGFRRGKECGHDVDFLITTPEMGREQLLPKVINLWEKKGLLLYYDLVESTFDKTRLPCRKFEAMDHFQKCFAIIKLKKELAAGRVQKDWKAIRVDFVLPPVDNFAFALLGWTGSRQFERDLRRFARHERKMLLDRHALYDKTKKIFLPAKTEEDIFAHLGLDYIPPWQRNA

SEQ ID NO: 702 - protein, 362 aa, Artificial Sequence
  Modified TdT Sequence
MENLYFQGTVSQYACQRRTTMENHNQIFTDAFAILAENAEFNESEGPCLAFRRAASLLKSLPHAISSSKDLEGLPCLGDQTKAVIEDILEYGQCSKVQDVLCDDRYQTIKLFTSVFGVGLKTAEKWYRKGFHSLEEVQADKAIHFTKMQKAGFLYYDDISAAVCKAEADAIGQIVEETVRLIAPDAIVTLTGGFRRGKEIGHDVDFLITTPEMGKEQLLPRVINLLEKKGLLLYYDLVESTFDKTRLPCRKFEAMDHFQKCFAIIKLKKELAAGRVQKDWKAIRVDFVMPPVDCFAFALLGWTGSRQFERDLRRFARHERKMLLDRHALYDRTKKIFLPAKTEEDIFAHLGLDYIDPWQRNA

SEQ ID NO: 703 - protein, 362 aa, Artificial Sequence
  Modified TdT Sequence
MENLYFQGTVSQYACQRRTTMENHNQIFTDAFAILAENAEFNESEGPALAFRRAASLLKSLPHAISSSKDLEGLPCLGDQTKAVIEDILEYGQCSKVQDVLCDDRYQTIKLFTSVFGVGLKTAEKWYRKGFHSLEEVQADKAIHFTKMQKAGFLYYDDISAAVCKAEADAIGQIVEETVRLIAPDAIVTLTGGFRRGKEIGHDVDFLITTPEMGKEQLLPKVINLLEQKGLLLYYDLVESTFDKTRLPCRKFEAMDHFQKCFAIIKLKKELAAGRVQKDWKAIRVDFVMPPADNFAFALLGWTGSRQFERDLRRFARHERKMLLDRHALYDKTKKIFLPAKTEEEIFAHLGLDYIPPWQRNA

SEQ ID NO: 704 - protein, 362 aa, Artificial Sequence
  Modified TdT Sequence
MENLYFQGTVSQYACQRRTTMENHNQIFTDAFAILAENAEFNESEGPCLAFRRAASLLKSLPHAISSSKDLEGLPCLGDQTKAVIEDILEYGQCSKVQDVLCDDRYQTIKLFTSVFGVGLKTAEKWYRKGFHSLEEVQADKAIHFTKMQRAGFLYYDDISAAVCKAEADAIGQIVEETVRLIAPDAIVTLTGGFRRGKECGHDVDFLITTPEMGKEQLLPKVINLWEKKGLLLYYDLVESTFDKTRLPCRKFEAMDNFQKCFAIIKLKKELAAGRVQKDWKAIRVDFVMPPVDNFAFALLGWTGSRQFERDLRRFARHERKMLLDRHALYDKRKKIFLPAKTEEDIFAHLGLDYIPPWQRNA

SEQ ID NO: 705 - protein, 362 aa, Artificial Sequence
  Modified TdT Sequence
MENLYFQGTVSQYACQRRTTMENHNQIFTDAFAILAENAEFNESEGPCLAFRRAASVLKSLPHAISSSKDLEGLPCLGDQTKAVIEDILEYGQCSKVQDVLCDDRYQTIKLFTSVFGVGLKTAEKWYRKGFHSLEEVQADKAIHFTKMQKAGFLYYDDISAAVCKAEADAIGQIVEETVRLIAPDAIVTLTGGFRRGKECGHDVDFLITTPEMGKEQLLPKVIRLWEKKGLLLYYDLVESTFDKTRLPCRKFEAMDHFQKCFAIIKLKKELAAGRVQKDWKAIRVDFVMPPVDRFAFALLGWTGSRQFERDLRRFARHERKMLLDRHALYDKTKKIFLPAKTEEDIFAHLGLDYIPPWQRNA

SEQ ID NO: 706 - protein, 362 aa, Artificial Sequence
  Modified TdT Sequence
MENLYFQGTVSQYACQRRTTMENHNQIFTDAFAILAENAEFNESEGPALAFRRAASLLKSLPHAISSLKDLEGLPCLGDQTKAVIEDILEYGQCSKVQDVLCDDRYQTIKLFTSVFGVGLKTAEKWYRMGFHSLEEVQADKAIQFTKMQRAGFLYYDDISAAVCKAEADAIGQIVEETVRLIAPDAIVTLTGGFRRGKEIGHDVDFLITTPEMGKEQLLPKVINLLEKKGLLLYYDLVESTFDKTRLPCRKFEAMDHFQKCFAIIKLKKELAAGRVQKDWKAIRVDFVMPPVDNFAFALLGWTGSRQFERDLRRFARHERKMLLDRHALYDKTKKIFLPAKTEEDIFAHLGLDYIPPWQRNA

SEQ ID NO: 707 - protein, 362 aa, Artificial Sequence
  Modified TdT Sequence
MENLYFQGTVSQYACQRRTTMENHNQIFTDAFAILAENAEFNESEGPALAFRRAASLLKSLPHAISSSKDLEGLPCLGDQTKAVIEDILEYGQCSKVQDVLCDDRYQTIKLFTSVFGVGLKTAEKWYRKGFHSLEEVQADKAIQFTKMQKAGFLYYDDISAAVCKAEADAIGQIVEETVRLIAPDAIVTLTGGFRRGKEIGHDVDFIITTPEMGKEQLLPKVIDLLEKKGLLLYYDLVESTFDKTRLPCRKFEAMDHFQKCFAIIKLKKERAAGRVQKDWKAIRVDFVMPPVDNFAFALLGWTGSRQFERDLRRFARHERKMLLDRHALYDKTKKIFLPAKTEEDIFAHLGLDYIPPWQRNA

SEQ ID NO: 708 - protein, 362 aa, Artificial Sequence
  Modified TdT Sequence
MENLYFQGTVSQYACQRRTTLENHNQIFTDAFAILAENAEFNESEGPALAFRRAASLLKSLPHAISSSKDLEGLPCLGDQTKAVIEDILEYGQCSKVQDVLCDDRYQTIKLFTSVFGVGLKTAEKWYRKGFHSLEEVQADRAIQFTKMQKAGFLYYDDISAAVCKAEADAIGQIVEETVRLIAPDAIVTLTGGFRRGKECGHDVDFLITTPEQGKEQLLPDVINLLEKKGLLLYYDLVESTFDKTRLPCRKFEAMDHFQKCFAIIKLKKELAAGRVQKDWKAIRVDFVMPPIDNFAFALLGWTGSRQFERDLRRFARHERKMLLDRHALYDKTKRIFLPAKTEEDIFAHLGLDYIPPWQRNA

SEQ ID NO: 709 - protein, 362 aa, Artificial Sequence
  Modified TdT Sequence
MENLYFQGTVSQYACQRRTTMENHNQIFTDAFAILAENAEFNESEGPCLAFRRAASLLKSLPHAISSSKDLEGLPCLGDQTKAVIEDILEYGQCSKVQDVLCDDRYQTIKLFTSVFGVGPKTAEKWYRKGFHSLEEVQADKAIHFTKMQKAGFLYYDDISAAVCKAEADAIGCIVEETVRLIAPDAIVTLTGGFRRGKEIGHDVDFLITTPEMGKEQLLPRVINLLEKKGLLLYYDLVESTFDKTRLPCRKFEAMDHFQKCFAIIKLKKELAAGRVQKDWKAIRVDFVMPPVDNFAFALLGWTGSRQFERDLRRFARHERKMLLDRHALYDKTKKIFLPAKTEEDIFAHLGLDYIDPWQRNA

SEQ ID NO: 710 - protein, 362 aa, Artificial Sequence
  Modified TdT Sequence
MENLYFQGTVSQYACQRRTTMENHNQIFTDAFAILAENAEFNESEGPCLAFRRAASVLKSLPHAISCSKDLEGLPCLGDQTKAVIEDILEYGQCSKVQDVLCDDRYQTIKLFTSVFGVGLKTAEKWYRKGFHSLEEVQADKAIHFTKMQRAGFLYYDDISAAVCKAEADAIGQIVEETVRLIAPDAIVTLTGGFRRGKECGHDVDFLITTPEMGKEQLLPKVINLWEKKGLLLYYDLVESTFDKTRLPCRKFEAMDHFQKCFAIIKLKKELAAGRVQKDWKAIRVDFVMPPVDNFAFALLGWTGSRQFERDLRRFARHERKMLLDRHALYDKTKKIFLPAKTEEDIFAHLGLDYIPPWQRNA

SEQ ID NO: 711 - protein, 362 aa, Artificial Sequence
  Modified TdT Sequence
MENLYFQGTVSQYACQRRTTMENHNQIFTDAFAILAENAEFNENEGPALAFRRAASLLKSLPHAISSSKDLEGLPCLGDQTKAVIEDILEYGQCSKVQDVLCDDRYQTIKLFTSVFGVGLKTAEKWYRKGFHSLEEVQADKAIHFTKMQKAGFLYYDDISAAVCKAEADAIGQIVEETVRLIAPDAIVTLTGGFRRGKEIGHDVDFLITTPEMGKEQLLPDVIDLLEKKGLLLYYDLVESTFDKTRLPCRKFEAMDHFQKCFAIIKLKKELAAGRVQKDWKAIRVDFVMPPVDNFAFALLGWTGSRQFERDLRRFARHERKMLLDRHALYDKTKKIFLPAKTEEDIFAHLGLDYIPPWQRNA

SEQ ID NO: 712 - protein, 362 aa, Artificial Sequence
  Modified TdT Sequence
MENLYFQGTVSQYACQRRTTMENHNQIFTDAFAILAENAEFNESEGPALAFRRAASLLKSLPHAISSSKDLEGLPCLGDQTKAVIEDILEYGQCSKVQDVLCDDRYQTIKLFTSVFGVGLKTAEKWYRKGFHSLEEVQADKAIQFTKMQKAGFLYYDDISAAVCKAEADAIGQIVEETVRLIAPDAIVTLTGGFRRGKECGHDVDFLITTPEMGKEQLLPDLINLLEKKGLLLYYDLVESTFDKTRLPCRKFEAMDHFQKCFAIIRLKKELAAGRVQKDWKAIRVDFVMPPADNFAFALLGWTGSRQFERDLRRFARHERKMLLDRHALYDKTKKIFLPAKTEEDIFAHLGLDYIPPWQRNA

SEQ ID NO: 713 - protein, 362 aa, Artificial Sequence
  Modified TdT Sequence
MENLYFQGTVSQYACQRRTTMENHNQIFTDAFAILAENAEFNESEGPCLAFRRAASLLKSLPHAISSSKDLEGLPCLGDQTKAVIEDILEYGQCSKVQDVLCDDRYQTIKLFTSVFGVGLKTAEKWYRKGFHSLEEVQADKAIHFTKMQKAGFLYYDDISAAVCKAEADAIGQIVEETVRLIAPDAIVTLTGGFRRGKEIGHDVDFLITTPEAGKEQLLPRVINLLEKKGLLLYYDLVESTFDKTRLPCRKFEAMDHFQKCFAIIKLKKELAAGRVQKDWKAIRVDFVLPPVDCFAFALLGWTGSRQFERDLRRFARHERKMLLDRHALYDKTKKIFLPAKTEEDIFAHLGLDYIPPWQRNA

SEQ ID NO: 714 - protein, 362 aa, Artificial Sequence
  Modified TdT Sequence
MENLYFQGTVSQYACQRRTTMENHNQIFTDAFAILAENAEFNESEGPCLAFRRAASLLKSLPHAISSSKDLEGLPCLGDQTKAVIEDILEYGQCSKVQDVLCDDRYQTIKLFTSVFGVGLKTAEKWYRKGFHSLEEVQADKAIHFTKMQKAGFLYYDDISAAVCKAEADAIGCIVEETVHLIAPDAIVTLTGGFRRGKEIGHDVDFLITTPEMGKEQLLPRVINLLEKKGLLLYYDLVESTFDKTRLPCRKFEAMDHFQKCFAIIKLKKELADGRVQKDWKAIRVDFVMPPVDNFAFALLGWTGSRQFERDLRRFARHERKMLLDRHALYDKTKKIFLPAKTEEDIFAHLGLDYIPPWQRNA

SEQ ID NO: 715 - protein, 362 aa, Artificial Sequence
  Modified TdT Sequence
MENLYFQGTVSQYACQRRTTTENHNQIFTDAFAILAENAEFNESEGPALAFRRAASLLKSLPHAISSSKDLEGLPCLGDQTKAVIEDILEYGQCSKVQDVLCDDRYQTIKLFTSVFGVGLKTAEKWYRKGFHSLEEVQADKAIQFTKMQKAGFLYYDDISAAVCKAEADAIGQIVEETVRLIAPDAIVTLTGGFRRGKECGHDVDFLITTPEMGKEQLLPKVINLLEKKGLLLYYDLVESTFDKTRLPCRKFEAMDHFQKCFAIIKLEKELAAGRVQKDWKAIRVDFVMPPIDNFAFALLGWTGSRQFERDLRRFARHERKMLLDRHALFDKTKKIFLPAKTEEDIFAHLGLDYIPPWQRNA

SEQ ID NO: 716 - protein, 362 aa, Artificial Sequence
  Modified TdT Sequence
MENLYFQGTVSQYACQRRTTMENHNQIFTDAFAILAENAEFNESEGPALAFRRAASLLKSLPHAISSSKDLEGLPCLGDQTKAVIEDILEYGQCSKVQDVLCDDRYQTIKLFTSVFGVGLKTAEKWYRKGFHSLEEVQADKAIQFTKMQRAGFLYYDDISAAVCKAEADAIGQIVEETVRLIAPDAIVTLTGGFRRGKEIGHDVDFLITTPEMGKEQLLPKVIDLLEKKGLLLYYDLVESTFDKTRLPCRKFEAMDHFQKCFAIIKLKKELAAGRVQKDWKAIRVDFVMPPVDNFAFALLGWTGSRQFERDLRRFARHERKMLLDRHALYDKTKKIFLPAKTEEEIFAHLGLDYIPPWQRNA

SEQ ID NO: 717 - protein, 362 aa, Artificial Sequence
  Modified TdT Sequence
MENLYFQGTVSQYACQRRTTMENHNQIFTDAFAILAENAEFNESEGPALAFRRAASLLKSLPHAISSSKDLEGLPCLGDQTKAVIEDILEYGQCSKVQDVLCDDRYQTIKLFTSVFGVGLKTAEKWYRKGFHSLEEVQADRAIQFTKMQKAGFLYYDDISAAVCKAEADAIGQIVEETVRKIAPDAIVTLTGGFRRGKECGHDVDFLITTPEKGKEQLLPDVINLLEKKGLLLYYDLVESTFDKTRLPCRKFEAMDHFQKCFAIIKLKKELAAGRVQKDWKAIRVDFVMPPIDNFAFALLGWTGSRQFERDLRRFARHERKMLLDRHALYDKTKKIFLPAKTEEDIFAHLGLDYIPPWQRNA

SEQ ID NO: 718 - protein, 362 aa, Artificial Sequence
  Modified TdT Sequence
MENLYFQGTVSQYACQRRTTMENHNQIFTDAFAILAENAEFNESEGPALAFRRAASLLKSLPHAISSSKDLEGLPCLGDQTKAVIEDILEYGQCSKVQDVLCDDRYQTIKLFTSVFGVGLKTAEKWYRKGFHSLEEVQADKAIQFTKMQKAGFLYYDDISAAVCKAEADAIGQIVEETVRLIAPDAIVTLTGGFRRGKECGHDVDFLITTPEMGKEQLLPKVINLLEKKGLLLYYDLIESTFDKTRLPCRKFEAMDHFQKCFAIIKLKKELADGRVQKDWKAIRVDFVMPPVDNFAFALLGWTGSRQFERDLRRFARHERKMLLDRHALYDKTKKIFLPAKTEEDIFAHLGLDYIPPWQRNA

SEQ ID NO: 719 - protein, 362 aa, Artificial Sequence
  Modified TdT Sequence
MENLYFQGTVSQYACQRRTTMENHNQIFTDAFAILAENAEFNESEGPCLAFRRAASLLKSLPHAISSSKDLEGLPCLGDQTKAVIEDILEYGQCSKVQDVLCDDRYQTIKLFTSVFGVGLKTAEKWYRKGFHSLEEVQADKAIHFTKMQKAGFLYYDDISAAVCKAEADAIGQIVEETVRLIAPDAIVALTGGFRRGKECGHDVDFLITTPEMGKEQLLPRVIDLWEKKGLLLYYDLVESTFDKTRLPCRKFEAMDHFQKCFAIIKLKKELAAGRVQKDWKAIRVDFVMPPVDNFAFALLGWTGSRQFERDLRRFARHERKMLLDRHALYDKTKKIFLPAKTEEDIFAHLGLDYIPPWQRNA

SEQ ID NO: 720 - protein, 362 aa, Artificial Sequence
  Modified TdT Sequence
MENLYFQGTVSQYACQRRTTMENHNQIFTDAFAILAENAEFNESEGPCLAFRRAASLLKSLPHAISSSKDLEGLPCLGDQTKAVIEDILEYGQCSKVQDVLCDDRYQTIKLFTSVFGVGLKTAEKWYRKGFHSLEEVQADKAIQFTKMQKAGFLYYDDISAAVCKAEADAIGHIVEETVRLIAPDAIVTLTGGFRRGKECGHDVDFLITTPEMGKEQLLPDVINLLEKKGLLLYYDLVESTFDKTRLPCRKFEAMDHFQKCFAIIRLKKELAAGRVQKDWKAIRVDFVMPPIDNFAFALLGWTGSRQFERDLRRFARHERKMLLDRHALYDKTKKIFLPAKTEEDIFAHLGLDYIPPWQRNA

SEQ ID NO: 721 - protein, 362 aa, Artificial Sequence
  Modified TdT Sequence
MENLYFQGTVSQYACQRRTTMENHNQIFTDAFAILAENAEFNESEGPALAFRRAASLLKSLPHAISSSKDLEGLPCLGDQTKAVIEDILEYGQCSKVQDVLCDDRYQTIKLFTSVFGVGLKTAEKWYRKGFHSLEEVQADKAIQFTKMQKAGFLYYDDISAAVCKAEADAIGQIVEETVRLIAPDAIVTLTGGFRRGKEIGHDVDFLITTPEMGKEQLLPKVINLLEKKGLLLYYDLVESTFDKTRLPCRKFEAMDHFQKCFAIIKLKKELADGRVQKDWKAIRVDFVMPPADNFAFALLGWTGSRQFERDLRRFARHERKMLLDRHALYDKTKRIFLPAKTEEDIFAHLGLDYIPPWQRNA

SEQ ID NO: 722 - protein, 362 aa, Artificial Sequence
  Modified TdT Sequence
MENLYFQGTVSQYACQRRTTMENHNQIFTDAFAILAENAEFNESEGPALAFLRAASLLKSLPHAISSSKDLEGLPCLGDQTKAVIEDILEYGQCSKVQDVLCDDRYQTIKLFTSVFGVGLKTAEKWYRKGFHSLEEVQADKAIQFTKMQKAGFLYYDDISAAVCKAEADAIGCIVEETVRLIAPDAIVTLTGGFRRGKEIGHDVDFLITTPEMGKEQLLPKVINLLEKKGLLLYYDLVESTFDKTRLPCRKFEAMDHFQKCFAIIKLKKELAAGRVQKDWKAIRVDFVMPPIDNFAFALLGWTGSRQFERDLRRFARHERKMLLDRHALYDKTKKIFLPAKTEEDIFAHLGLDYIPPWQRNA

SEQ ID NO: 723 - protein, 362 aa, Artificial Sequence
  Modified TdT Sequence
MENLYFQGTVSQYACQRRTTMENHNQIFTDAFAILAENAEFNESEGPCLAFLRAASLLKSLPHAISSSKDLEGLPCLGDQTKAVIEDILEYGQCSKVQDVLCDDRYQTIKLFTSVFGVGLKTAEKWYRKGFHSLEEVQANKAIHFTKMQKAGFLYYDDISAAVCKAEADAIGQIVEETVRLIAPDAIVTLTGGFRRGKECGHDVDFLITTPEMGKEQLLPKVINLWEKKGLLLYYDLVESTFDKTRLPCRKFEAMDHFQKCFAIIKLKAELAAGRVQKDWKAIRVDFVMPPVDNFAFALLGWTGSRQFERDLRRFARHERKMLLDRHALYDKTKKIFLPAKTEEDIFAHLGLDYIPPWQRNA

SEQ ID NO: 724 - protein, 362 aa, Artificial Sequence
  Modified TdT Sequence
MENLYFQGTVSQYACQRRTTMENHNQIFTDAFAILAENAEFNESEGPCLAFRRAASLLKSLPHAISSSKDLEGLPCLGDQTKAVIEDILEYGQCSKVQDVLCDDRYQTIKLFTSVFGVGLKTAEKWYRKGFHSLEEVQADKAIHFTKMQRAGFLYYDDISAAVCKAEADAIGQIVEETVRLIAPDAIVTLTGGFRRGKEIGHDVDFLITTPEMGREQLLPRVINLLEKKGLLLYYDLVESTFDKTRLPCRKFEAMDHFQKCFAIIKLKKELADGRVQKDWKAIRVDFVMPPVDNFAFALLGWTGSRQFERDLRRFARHERKMLLDRHALYDKTKKIFLPAKTEEDIFAHLGLDYIPPWQRNA

SEQ ID NO: 725 - protein, 362 aa, Artificial Sequence
  Modified TdT Sequence
MENLYFQGTVSQYACQRRTTMENHNQIFTDAFAILAENAEFNESEGPALAFRRAASLLKSLPHAISSSKDLEGLPCLGDQTKAVIEEILEYGQCSKVQDVLCDDRYQTIKLFTSVFGVGLKTAEKWYRKGFHSLEEVQADKAIQFTKMQKAGFLYYDDISAAVCKAEADAIGQIVEETVRLIAPDAIVTLTGGFRRGKECGHDVDFLITTPEMGKEQLLPDVMNLLEKKGLLLYYDLVESTFDKTRLPCRKFEAMDHFQKCFAIIKLKKERAAGRVQKDWKAIRVDFVMPPIDNFAFALLGWTGSRQFERDLRRFARHERKMLLDRHALYDKTKKIFLPAKTEEDIFAHLGLDYIPPWQRNA

SEQ ID NO: 726 - protein, 362 aa, Artificial Sequence
  Modified TdT Sequence
MENLYFQGTVSQYACQRRTTMENHNQIFTDAFAILAENAEFNESEGPCLAFRRAASLLKSLPHAISSSKDLEGLPCLGDQTKAVIEDIIEYGQCSKVQDVLCDDRYQTIKLFTSVFGVGLKTAEKWYRKGFHSLEEVQADKAIHFTKMQKAGFLYYDDISAAVCKAEADAIGQIVEETVRLIAPDAIVTLTGGFRRGKECGHDVDFLITTPEMGREQLLPKVINLWEKKGLLLYYDLVESTFDKTRLPCRKFEAMDHFQKCFAIIKLKKELADGRVQKDWKAIRVDFVMPPVDNFAFALLGWTGSRQFERDLRRFARHERKMLLDRHALYDKTKKIFLPAKTEEDIFAHLGLDYIPPWQRNA

SEQ ID NO: 727 - protein, 362 aa, Artificial Sequence
  Modified TdT Sequence
MENLYFQGTVSQYACQRRTTMENHNQIFTDAFAILAENAEFNESEGPCLAFRRAASLLKSLPHAISSSKDLEGLPCLGDQTKAVIEDILEYGQCSKAQDVLCDDRYQTIKLFTSVFGVGLKTAEKWYRKGFHSLEEVQADKAIHFTKMQKAGFLYYDDISAAVCKAEADAIGRIVEETVRLIAPDAIVTLTGGFRRGKECGHDVDFLITTPEMGKEQLLPKVINLWEKKGLLLYYDLVESTFDKLRLPCRKFEAMDHFQKCFAIIKLKKELAAGRVQKDWKAIRVDFVMPPVDNFAFALLGWTGSRQFERDLRRFARHERKMLLDRHALYDKTKKIFLPAKTEEDIFAHLGLDYIPPWQRNA

SEQ ID NO: 728 - DNA, 15 bp, Artificial Sequence
  Modified Sequence
ttttttgactttttt
